(19) United States
(12) Patent Application Publication
(10) Pub. No.: US 2025/0368996 A1
(43) Pub. Date: Dec. 4, 2025

(54) MODIFIED ANTISENSE OLIGONUCLEOTIDES FOR TREATING HEPATITIS B VIRUS

(71) Applicant: Aligos Therapeutics, Inc., South San Francisco, CA (US)

(72) Inventors: Vivek K. Rajwanshi, Cupertino, CA (US); Jin Hong, Pacifico, CA (US); Leonid Beigelman, San Mateo, CA (US); Antitsa Stoycheva, South San Francisco, CA (US); Aneerban Bhattacharya, South San Francisco, CA (US); David B. Smith, South San Francisco, CA (US); Kellan Passow, South San Francisco, CA (US); Rostom Ahmed-Belkacem, South San Francisco, CA (US); Jacquelyn Sousa, South San Francisco, CA (US)

(73) Assignee: Aligos Therapeutics, Inc., South San Francisco, CA (US)

(21) Appl. No.: 19/206,988

(22) Filed: May 13, 2025

Related U.S. Application Data
(60) Provisional application No. 63/647,238, filed on May 14, 2024.
(60) Provisional application No. 63/727,158, filed on Dec. 2, 2024.

(51) Int. Cl. C12N 15/113; A61P 31/14

(52) U.S. Cl. CPC C12N 15/1131; A61P 31/14; C12N 2310/11; C12N 2310/315; C12N 2310/321; C12N 2310/3231; C12N 2310/341; C12N 2310/351; C12N 2320/32

(57) ABSTRACT

Provided herein are antisense oligonucleotides and compositions that include the disclosed ASOs. The disclosed ASOs and compositions can be used for treating hepatitis B.

### CROSS REFERENCE TO RELATED APPLICATIONS

[0001] This application claims priority to and the benefit of U.S. Provisional Application No. 63/647,238, filed May 14, 2024, and U.S. Provisional Application No. 63/727,158, filed Dec. 2, 2024. The contents of these applications are incorporated herein by reference in their entireties.

### SEQUENCE LISTING

[0002] The instant application contains a Sequence Listing which has been submitted electronically in XML format and is hereby incorporated by reference in its entirety. Said XML copy, created on Aug. 15, 2025, is named 122400-0435_SL.xml and is 17,053,529 bytes in size.

### TECHNICAL FIELD

[0003] This disclosure relates to antisense oligonucleotides (ASOs) comprising modified nucleotides, compositions, and uses thereof. More particularly, this disclosure relates to ASOs, pharmaceutical compositions, and uses thereof to treat diseases and infections, such as hepatitis B viral infection.

### BACKGROUND

[0004] The following description of the background of the present technology is provided simply as an aid in understanding the present technology and is not admitted to describe or constitute prior art to the present technology.

[0005] Around 300 million people are chronically infected with hepatitis B virus (HBV) worldwide. For these chronic hepatitis B (CHB) patients, HBsAg loss, a key aspect of “functional cures”, is the goal of many new therapies being developed. Antisense oligonucleotides (ASOs) have been demonstrated to be an effective modality in reducing HBsAg in animal models, and in clinical studies through degradation of viral RNA and possibly through activation of the innate immune system.

[0006] However, treatment of HBV with antisense oligonucleotides still exhibits some safety problems, including liver toxicity. Thus, there is a need in the art to discover antisense oligonucleotides that have improved safety profiles and increased efficacy.

### SUMMARY

[0007] The present disclosure provides antisense oligonucleotide and compositions containing ASOs, as well as methods and uses for preventing or treating hepatitis B with the disclosed ASOs and compositions.

[0008] Disclosed herein is an antisense oligonucleotide (ASO) that is complementary to at least 5, 6, 7, 8, 9, 10, 11, 12, 13, 14, or 15 contiguous nucleotides within positions 1570-1610 of SEQ ID NO: 1, has a nucleic acid sequence comprising or consisting of 18-23 nucleotides and, optionally, at least one of the nucleotides is replaced with an abasic monomer, and comprises at least one phosphorothioate linkage and at least one 2′-O-methoxyethyl nucleotide.

[0009] In some embodiments, the ASO is complementary to at least 5, 6, 7, 8, 9, 10, 11, 12, 13, 14, or 15 contiguous nucleotides within positions 1575-1610 of SEQ ID NO: 1. In some embodiments, the ASO is complementary to at least 5, 6, 7, 8, 9, 10, 11, 12, 13, 14, or 15 contiguous nucleotides within positions 1579-1606 of SEQ ID NO: 1. In some embodiments, the nucleic acid sequence comprises or consists of any one of SEQ ID NOs: 321-352.

[0010] In some embodiments, the ASO comprises at least one 5-methylcytosine. In some embodiments, the ASO comprises two or three 5-methylcytosines.

[0011] In some embodiments, the at least one phosphorothioate linkage is a stereo-defined phosphorothioate linkage. In some embodiments, the ASO comprises (a) a 5′-wing region (A′) comprising 2 to 7 locked nucleotides or substituted nucleotides; (b) a central region (B′) comprising 5 or more contiguous nucleotides; and (c) a 3′-wing region (C′) comprising 2 to 7 locked nucleotides or substituted nucleotides.

[0012] In some embodiments, the central region (B′) comprises DNA nucleotides. In some embodiments, (i) the 5′-wing region (A′) comprises 1 to 7 phosphorothioate-linked locked nucleotides, (ii) the 3′-wing region (C′) comprises 1 to 7 phosphorothioate-linked locked nucleotides, or (iii) any combination thereof. In some embodiments, each locked nucleotide is independently selected from LNA, ScpBNA, AmNA, AmNA (N-Me), GuNA, GuNA (N—R), and any combination thereof. In some embodiments, the ASO comprises (a) a 5′-wing region (A′) comprising 5 nucleotides; (b) a central region (B′) comprising 10 nucleotides; and (c) a 3′-wing region (C′) comprising 5 nucleotides.

[0013] In some embodiments, (i) the 5′-wing region (A′) comprises a 2′-O-cyclopropyl nucleotide or a 2′-O-methylcyclopropyl nucleotide, (ii) the 3′-wing region (C′) comprises a 2′-O-cyclopropyl nucleotide or a 2′-O-methylcyclopropyl nucleotide, or (iii) any combination thereof. In some embodiments, (i) the 5′-wing region (A′) comprises at least one 2′-OMe nucleotide, (ii) the 3′-wing region (C′) comprises at least one 2′-OMe nucleotide, or (iii) any combination thereof.

[0014] In some embodiments, the central region (B′) comprises at least one RNA, at least one 2′-substituted nucleotide, at least one nucleotide with a modified base, at least one abasic monomer, or any combination thereof. In some embodiments, the at least one RNA, at least one substituted nucleotide, or at least one nucleotide with a modified base, or at least one abasic monomer is located at any one of positions 1-6 of the central region (B′) relative to the 5′ end of the ASO. In some embodiments, the substituted nucleotide is selected from 2′-O-cyp, 2′-O-mcyp, 2′-OMe, and 2′-OMe-3′-xylo. In some embodiments, the abasic monomer is selected from abasic monomer 1, abasic monomer 2, abasic monomer 3, and abasic monomer 4. In some embodiments, the nucleotide with a modified base is selected from (8nh)G, (8nh)A, (2s)T, and (5oh)C.

[0015] In some embodiments, the ASO further comprises 1-6 ribonucleotides attached to the 5′ end of the ASO or 1-3 ribonucleotides attached to the 3′ end of the ASO. In some embodiments, 4-6 ribonucleotides are attached to the 5′ end of the ASO.

[0016] Disclosed herein is an antisense oligonucleotide (ASO) that is complementary to at least 5, 6, 7, 8, 9, 10, 11, 12, 13, 14, or 15 contiguous nucleotides within positions 1570-1610 of SEQ ID NO: 1, has a nucleic acid sequence comprising or consisting of 18-23 nucleotides and, optionally, at least one of the nucleotides is replaced with an abasic monomer, and comprises 4-6 ribonucleotides attached to the 5′ end of the ASO or 1-3 ribonucleotides attached to the 3′ end of the ASO.

[0017] Disclosed herein is an antisense oligonucleotide (ASO) comprising or consisting of any one of SEQ ID NO: 3-320, 353-404, and 446-1344. ASOs of particular interest, due to observed activity, include but are not limited to, ASO-676 (SEQ ID NO: 697), ASO-677 (SEQ ID NO: 698), ASO-1037 (SEQ ID NO: 1058), ASO-707 (SEQ ID NO: 728), ASO-1192 (SEQ ID NO: 1213), ASO-651 (SEQ ID NO: 672), ASO-1166 (SEQ ID NO: 1187), ASO-1181 (SEQ ID NO: 1202), ASO-1179 (SEQ ID NO: 1200), and ASO-962 (SEQ ID NO: 983). In some embodiments, the ASO is selected from ASO-676 (SEQ ID NO: 697), ASO-677 (SEQ ID NO: 698), ASO-1037 (SEQ ID NO: 1058), ASO-707 (SEQ ID NO: 728), and ASO-1192 (SEQ ID NO: 1213). In some embodiments, the ASO is selected from ASO-651 (SEQ ID NO: 672), ASO-1166 (SEQ ID NO: 1187), ASO-1181 (SEQ ID NO: 1202), and ASO-1179 (SEQ ID NO: 1200). In some embodiments, the ASO is ASO-962 (SEQ ID NO: 983).

[0018] In some embodiments of any of the ASO disclosed herein, the ASO may further comprise a conjugate (e.g., a GalNAc) attached to the 5′ end or the 3′ end of the ASO or both the 5′ end and the 3′ end.

[0019] Disclosed herein is a pharmaceutical composition comprising the ASO according to any of the above aspects or embodiments and a pharmaceutically acceptable excipient.

[0020] Disclosed herein is a method of treating a subject having a Hepatitis B virus (HBV) infection, comprising administering to the subject with HBV an ASO according to any one of the aspects and embodiments described above or the pharmaceutical composition described above. In some embodiments, the method further comprises administering an additional therapeutic agent. In some embodiments, the additional treatment agent is selected from a nucleotide analog, nucleoside analog, a capsid assembly modulator (CAM), a recombinant interferon, an entry inhibitor, a small molecule immunomodulatory, and oligonucleotide therapy, wherein the oligonucleotide therapy is optionally selected from an additional antisense oligonucleotide (ASO), a short interfering nucleic acid (siNA), NAPs, or STOPS™. In some embodiments, the additional therapeutic agent is selected from the group consisting of ALG-000184, ALG-125755, recombinant interferon alpha 2b, IFN-α, PEG-IFN-α-2a, PEG-INF-2b, Pegbing (Mipeginterferon alfa-2b), lamivudine, telbivudine, adefovir dipivoxil, clevudine, entecavir, tenofovir alafenamide, tenofovir disoproxil, JNJ-3989 (ARO-HBV, or GSK5637608), GSK3228836, REP-2139, REP-2165, VIR-2218 (BRII-835, or Elebsiran), AB-729 (Imdurisan), DCR-HBVS (RG6346 or Xalnesiran), BW-20507 (Argo HBV siRNA), HT-101 (Hepa Thera HBV siRNA), OLX703A (Olix HBV siRNA), HRS-5635 (Hengrui HBV siRNA), RBD1016 (Ribo HBV siRNA), TQA3038 (ChiaTai Tianqing HBV siRNA), GLS4, NZ-4, RG7907, EDP-514, ABI-H03733, ABI-H2158, ZM-H1505R, ABI-4334 (CAMs), and ABI-6250 (HDV entry inhibitor). In some embodiments, the ASO and the additional therapeutic agent are administered concurrently or consecutively. In some embodiments, the treatment results in reducing a viral load of HBV in the subject, reducing a level of a virus antigen in the subject, or a combination thereof. In some embodiments, the treatment results in increased toll-like receptor 8 (TLR8) activity. In some embodiments, the subject is a mammal, optionally a human.

[0021] In another aspect, the present disclosure provides an antisense oligonucleotide (ASO), comprising:
[0022] (a) a 5′-wing region (A′) comprising 2 to 7 nucleotides;
[0023] (b) a central region (B′) comprising up to 16 positions comprising at least one abasic monomer and 5 to 15 nucleotides; and
[0024] (c) a 3′-wing region (C′) comprising 2 to 7 nucleotides.

[0025] In some embodiments, the 1 to 7 nucleotides of the 5′-wing region (A′) are locked nucleotides or substituted nucleotides. In some embodiments, the 1 to 7 nucleotides of the 3′-wing region (C′) are locked nucleotides or substituted nucleotides.

[0026] In some embodiments, the at least one abasic monomer has a structure of

[chemical structure]

wherein R is H, alkyl (e.g., CH₃), an alkoxy (e.g., O—CH₃ or MOE), O-cyp, or O-mcyp or R can connect to the 4′ of the sugar to form a locked abasic monomer, and wherein [symbol] represents a phosphodiester linkage, a phosphorothioate linkage, a mesyl phosphoroamidate linkage, or H. In some embodiments, the at least one abasic monomer is selected from a 2′-deoxy abasic monomer or a 2′-substituted abasic monomer, such as abasic monomer 1, abasic monomer 2, abasic monomer 3, and abasic monomer 4.

[0027] In some embodiments, the central region (B′) comprises 10 positions (e.g., one abasic monomer and nine nucleotides) and the at least one abasic monomer is located at any one of positions 4, 5, or 6 of the central region (B′).

[0028] In some embodiments, the 5′-wing region (A′) and the 3′-wing region (C′) each independently comprise 5 nucleotides. In some embodiments, the 5 nucleotides comprise locked nucleotides, 2′-MOE nucleotides, or a combination thereof.

[0029] In some embodiments, the 5 to 15 nucleotides of the central region (B′) are DNA.

[0030] In some embodiments, at least one and up to all linkages in the ASO are phosphorothioate linkages.

[0031] In some embodiments, the central region (B′) contains only one abasic monomer. In some embodiments, the central region (B′) contains 2, 3, or 4 abasic monomers.

[0032] In some embodiments, (i) the 5′-wing region (A′) comprises one or two locked nucleic acids (LNAs); (ii) the 3′-wing region (C′) comprises one or two LNAs; or (iii) the 5′-wing region (A′) comprises one LNA and the 3′-wing region (C′) comprises one LNA.

[0033] In some embodiments, wherein the 5′-wing region (A′) and the 3′-wing region (C′) each independently comprise five 2′-MOE nucleotides, the central region (B′) comprises 10 positions and the at least one abasic monomer is located at any one of positions 4, 5, or 6 of the central region (B′), wherein all linkages in the ASO are phosphorothioate linkages; and, optionally, wherein: (i) the 5′-wing region (A′) comprises one or two locked nucleic acids (LNAs); (ii) the 3′-wing region (C′) comprises one or two LNAs; or (iii) the 5′-wing region (A′) comprises one LNA and the 3′-wing region (C′) comprises one LNA.

[0034] In some embodiments:
[0035] (a) the 5′-wing region (A′) and the 3′-wing region (C′) each independently comprise five 2′-MOE nucleotides, the central region (B′) comprises 10 positions consisting of one abasic monomer 1 at position 4 and the remaining positions being DNA nucleotides, wherein all linkages in the ASO are phosphorothioate linkages;
[0036] (b) the 5′-wing region (A′) and the 3′-wing region (C′) each independently comprise five 2′-MOE nucleotides, the central region (B′) comprises 10 positions consisting of one abasic monomer 1 at position 5 and the remaining positions being DNA nucleotides, wherein all linkages in the ASO are phosphorothioate linkages;
[0037] (c) the 5′-wing region (A′) and the 3′-wing region (C′) each independently comprise five 2′-MOE nucleotides, the central region (B′) comprises 10 positions consisting of one abasic monomer 1 at position 6 and the remaining positions being DNA nucleotides, wherein all linkages in the ASO are phosphorothioate linkages;
[0038] (d) the 5′-wing region (A′) and the 3′-wing region (C′) each independently comprise five 2′-MOE nucleotides, the central region (B′) comprises 10 positions consisting of one abasic monomer 2 at position 4 and the remaining positions being DNA nucleotides, wherein all linkages in the ASO are phosphorothioate linkages;
[0039] (e) the 5′-wing region (A′) and the 3′-wing region (C′) each independently comprise five 2′-MOE nucleotides, the central region (B′) comprises 10 positions consisting of one abasic monomer 2 at position 5 and the remaining positions being DNA nucleotides, wherein all linkages in the ASO are phosphorothioate linkages;
[0040] (f) the 5′-wing region (A′) and the 3′-wing region (C′) each independently comprise five 2′-MOE nucleotides, the central region (B′) comprises 10 positions consisting of one abasic monomer 2 at position 6 and the remaining positions being DNA nucleotides, wherein all linkages in the ASO are phosphorothioate linkages;
[0041] (g) the 5′-wing region (A′) comprises five 2′-MOE nucleotides; the 3′-wing region (C′) comprises five positions comprising 2′-MOE nucleotides at positions 1, 2, and 4 and LNAs at positions 3 and 5; and the central region (B′) comprises 10 positions consisting of one abasic monomer 1 at position 6 and the remaining positions being DNA nucleotides, wherein all linkages in the ASO are phosphorothioate linkages; or
[0042] (h) the 5′-wing region (A′) comprises five positions comprising 2′-MOE nucleotides at positions 1, 2, 4, and 5 and an LNAs at position 3; the 3′-wing region (C′) comprises five positions comprising 2′-MOE nucleotides at positions 1, 2, 4, and 5 and an LNA at position 3; the central region (B′) comprises 10 positions consisting of one abasic monomer 2 at position 6 and the remaining positions being DNA nucleotides, wherein all linkages in the ASO are phosphorothioate linkages.

[0043] In some embodiments, the ASO is selected from ASO-676 (SEQ ID NO: 697), ASO-677 (SEQ ID NO: 698), ASO-1037 (SEQ ID NO: 1058), ASO-707 (SEQ ID NO: 728), ASO-1192 (SEQ ID NO: 1213), ASO-651 (SEQ ID NO: 672), ASO-1166 (SEQ ID NO: 1187), ASO-1181 (SEQ ID NO: 1202), ASO-1179 (SEQ ID NO: 1200), and ASO-962 (SEQ ID NO: 983).

[0044] In some embodiments, the ASO further comprises a conjugate attached to the 5′ end or 3′ end of the ASO. In some embodiments, the conjugate comprises a GalNAc. In some embodiments, the GalNAc is a monomeric GalNAc. In some embodiments, the GalNAc is GalNAc 4 (i.e., the GalNAc of Formula VII, wherein n=1 and R^{z}=OH).

[0045] Disclosed herein is a use of an ASO according to any one of aspects or embodiments described above in the manufacture of a medicament for treating an HBV infection.

[0046] Disclosed herein is the ASO of any one of the aspects or embodiments described above for treating an HBV infection.

### BRIEF DESCRIPTION OF THE DRAWINGS

[0047] FIG. 1A-1E: FIGS. 1A, 1B, 1C, 1D, and 1E show the results of assays measuring maximum human toll-like receptor (TLR) activity in response to treatment with various disclosed ASOs at the dose range of 10 μM, 1 μM, 0.1 μM, 0.01 μM and 0 μM. Specifically, FIG. 1A shows maximum human TLR3 activity with poly AU as positive control, FIG. 1B shows maximum human TLR4 activity with LPS as positive control, FIG. 1C shows maximum human TLR7 activity with R848 as positive control, FIG. 1D shows maximum human TLR8 activity with small molecule GS-9688 and oligonucleotide poly U as positive controls, and FIG. 1E shows maximum human TLR9 activity with ODN2006 as positive control.

[0048] FIG. 2 shows the percentage body weight change of mice treated with PBS (Group 1), ASO-1 (Group 3), ASO-ASO-139 (Group 9) and ASO-6 (Group 5) after treatment at 50 mg/kg on day 0, day 3, day 7, day 10, day 14, and day 21 in AAV-HBV infected human TLR8 knock-in mice.

[0049] FIG. 3A-3C depicts the effects of a mono GalNAc modification on ASO-6. FIG. 3A shows an exemplary ASO-651 molecule produced from the parental strain ASO-6. Figure discloses SEQ ID NOS 7 and 672, respectively. FIG. 3B shows the results of the amount of both ASO-6 and ASO-651 uptake in macrophages after 1 hour or 24 hours treatment of 1 uM or 10 uM. FIG. 3C shows the effect of 5 nM, 14 nM, 41 nM, 123 nM, 370 nM, 1111 nM, 3333 nM, and 10000 nM of ASO-6 and ASO-651 in HEK-Blue hTLR8 cells on hTLR8 agonist activity which was monitored through SEAP reporter assay.

[0050] FIG. 4A-4C unconjugated ASO (ASO-6) vs Mono GalNAc ASO (ASO-651) PK/PD effects in hTLR8 Knock-in mice. FIG. 4A shows the effect of ASO-6 and ASO-651 on the kidney/liver ratio on uninfected mice 4 hours post treatment at 40 mg/kg and FIG. 4B shows the effect of ASO-6 and ASK-651 on the kidney/liver ratio on AAV-HBV infected mice 4 hours post treatment at 40 mg/kg. FIG. 4C shows the PD effect of ASO-6 and ASO-651 on the uninfected hTLR8 knock-in mice IL-12 p40 profile 4 hours post 40 mg/kg treatment (FIG. 4C).

[0051] FIG. 5 shows the effects of ASO-182 and ASO-222, as well as ASO-1 positive control and PBS negative control, on HBsAg (left graph) and Terminal Human ALT1 (right graph) in PXB mice with humanized livers injected with 7×50 mg/kg per dose of PBS or ASO over a time course of 28 days.

[0052] FIG. 6 shows the effect of ASO-1, ASO-139, ASO-6, ASO-114, ASO-153, ASO-182, ASO-222 4 hours post a single dose of 40 mg/kg in AAV-HBV infected hTLR8 knock in mice on liver protein levels of IL-12 p40 (top left), IP-10 (top right), IL-18 (bottom left) and TNF-alpha (bottom right) measured through Luminex mouse multiplex panel.

[0053] FIG. 7 shows exemplary ASO molecules produced from the parental strain ASO-6 using two LNA modifications selected from a pool of ASOs designed through LNA walk. Figure discloses SEQ ID NOS 7, 183, 576, 580, and 577, respectively, in order of appearance.

[0054] FIG. 8 depicts the experimental design of evaluating HBSAG, HBeAg, HBV DNA, and ALT levels in the AAV-HBV infected C57BL/6 mouse model.

[0055] FIG. 9 shows the effect of ASO-555, ASO-556, and ASO-559 on HBsAg levels in plasma (left) and HBeAg levels in plasma (right) in an AAV-HBV C57BL/6 mouse model. Mice were injected with 40 mg/kg on days 0, 3, 7, 10, 14, and 21. On day 7, 14, and 21, plasma was collected and tested for HBsAg and HBeAg. Group 1 was injected with PBS, Group 2 with ASO-1 control, Group 3 with ASO-139 control, Group 4 with ASO-555, Group 5 with ASO-556, and Group 6 with ASO-559.

[0056] FIG. 10 shows the effects of ASO-6, ASO-555, and ASO-556 on liver cytokine proteins in an uninfected hTLR8 knock in mouse model. Mice were treated with a single dose of 40 mg/kg of either PBS, ASO-1, ASO-6, ASO-555, and ASO-556. Levels of IFN alpha (top left), IFN beta (top right), IL-12/IL23 p40 (bottom left), and TNF alpha (bottom right) protein levels were determined at 4 hours post dose. *p<0.05 **p<0.005.

[0057] FIG. 11 shows the effects of ASO-713 and ASO-714 on HBsAg levels in plasma in a mouse model. Mice were injected with 25 mg/kg of PBS (Group 1), ASO-1 control (Group 2), ASO-139 control (Group 4), ASO-713 (Group 11), and ASO-714 (Group 12), on days 0, 3, 7, 10, 14, and 21, and HBsAg IU/ml in mouse plasma at various time points was measured.

[0058] FIG. 12 shows exemplary ASO molecules produced from the parental strain ASO-1 with 2′-OMe Abasic modifications in the gap region. Figure discloses SEQ ID NOS 693-702, respectively, in order of appearance.

[0059] FIG. 13 shows the effects of ASO-672 and ASO-677 on HBsAg levels in plasma (left) and HBeAg levels in plasma (right), as well as liver and kidney ASO concentrations (bottom) in an AAV-HBV mouse model. Mice were injected with PBS as a negative control (Group 1), and 6×40 mg/kg per dose of ASO-1 control (Group 2), ASO-139 control (Group 3), ASO-672 (Group 7), and ASO-677 (Group 8), on days 0, 3, 7, 10, 14, and 21. HBsAg IU/ml and HBeAg PEIU/mL at various time points are presented. Liver and kidney ASO concentrations were determined through LCMS at the conclusion of the 28 day study.

[0060] FIG. 14 shows the effects of ASO-673, ASO-674, ASO-675, ASO-676, ASO-678, ASO-679, ASO-683, ASO-684, ASO-686, ASO-687, ASO-690, ASO-691, ASO-692 and ASO-693 on HBsAg levels in plasma, as well as liver and kidney ASO concentrations for ASO-676 in a n AAV-HBV mouse model. For the top right panel, mice were injected with of PBS (Group 1) or 6×25 mg/kg of ASO-1 control, ASO-673, ASO-674, ASO-675, ASO-676, ASO-678, and ASO-679, and HBsAg levels were assessed on days 0, 3, 7, 10, 14, 21, and 28. In the bottom right panel, HBsAg was measured at various time points. Liver and kidney ASO concentrations were determined at the conclusion of the 28 day study. The left-side panels show the effects of ASO-683, ASO-684, ASO-686, ASO-687, ASO-690, ASO-691, ASO-692 and ASO-693 on levels of HBsAg in AAV-HBV mouse model. AAV-HBV mice were injected subcutaneously with PBS (negative control) or 6×25 mg/kg ASOs including ASO-1 and ASO-139 as positive controls on days 0, 3, 7, 10, 14 and 21. Plasma from days 0, 7, 14, 21 and 28 were used for HBsAg ELISA measurement

[0061] FIG. 15 shows exemplary ASO molecules produced from the parental construct ASO-1 with 2′-deoxy abasic monomer modifications in the gap regions. Figure discloses SEQ ID NOS 2, and 723-732, respectively, in order of appearance.

[0062] FIG. 16 shows the effects of ASO-704, ASO-706, ASO-707, and ASO-710 on HBsAg levels in plasma as well as liver and kidney ASO concentrations in an AAV-HBV mouse model. Mice were injected with PBS (Group 1) or 6×25 mg/kg of ASOs including ASO-1 control (Group 2), ASO-139 control (Group 4), ASO-704 (Group 13), ASO-706 (Group 14), ASO-707 (Group 15), and ASO-710 (Group 16) on days 0, 3, 7, 10, 14, and 21, and HBsAg was measured weekly at various time points. Liver and kidney ASO concentrations were determined at the conclusion of the 28 day study.

[0063] FIG. 17 shows exemplary ASO molecules produced from the parental construct ASO-672 with 2′-OMe abasic monomer modifications in the gap regions and LNA modifications in various positions. Figure discloses SEQ ID NOS 693 and 807-818, respectively, in order of appearance.

[0064] FIG. 18 shows exemplary ASO molecules produced from the parental strain ASO-672 with 2′-OMe abasic monomer modifications in the gap regions and LNA modifications in various positions. Figure discloses SEQ ID NOS 819-831, respectively, in order of appearance.

[0065] FIG. 19 shows exemplary ASO molecules produced from the parental strain ASO-672 with 2′-OMe abasic monomer modifications in the gap regions and LNA modifications in various positions. Figure discloses SEQ ID NOS 832-841, respectively, in order of appearance.

[0066] FIG. 20 shows exemplary ASO molecules produced from the parental strain ASO-672 with 2′-OMe abasic monomer modifications in the gap regions and LNA modifications in various positions. Figure discloses SEQ ID NOS 842-851, respectively, in order of appearance.

[0067] FIG. 21 shows exemplary ASO molecules produced from the parental strain ASO-677 with 2′-OMe abasic monomer modifications in the gap regions and additional LNA modifications in various positions. Figure discloses SEQ ID NOS 698, and 981-986, respectively, in order of appearance.

[0068] FIG. 22 shows exemplary ASO molecules with a 5′-mono-GalNac modification produced from the parental construct ASO-962, ASO-963, or ASO-965 that have with 2′-OMe abasic monomer modifications in the gap regions and LNA modifications. Figure discloses SEQ ID NOS 983-986, 1088, and 1154-1155, respectively, in order of appearance.

[0069] FIG. 23 shows the effects of ASO-962, ASO-1067, ASO-963, ASO-1133, ASO-965, and ASO-1134 on HBsAg levels in plasma in AAV-HBV C57BL/6 mice. Mice were treated with either PBS (Group 1), ASO-1 (Group 2; 6×25 mg/kg), ASO-1 (Group 3; 6×40 mg/kg), ASO-139 (Group 4; 6×25 mg/kg), ASO-962 (Group 5; 6×25 mg/kg), ASO-1067 (Group 6; 6×25 mg/kg), ASO-963 (Group 7; 6×25 mg/kg), ASO-1133 (Group 8; 6×25 mg/kg), ASO-965 (Group 9; 6×25 mg/kg), and ASO-1134 (Group 10; 6×25 mg/kg). HBsAg in mouse plasma was measured on day 7 post Day 0 and D3 two treatments.

[0070] FIG. 24 shows the effects of ASO-962 and ASO-1067 on HBsAg levels in plasma in AAV-HBV mouse model. Mice were injected with PBS (Group 1), or 6×25 mg/kg ASOs as follows: ASO-1 control (Group 2), ASO-139 control (Group 4), ASO-962 (Group 5), and ASO-1067 (Group 6). Subcutaneous dosing occurred on days 0, 3, 7, 10, 14, and 21, and HBsAg was measured weekly at various time points.

[0071] FIG. 25 shows the effects of ASO-963 and ASO-1133 on HBsAg levels in plasma in AAV-HBV mouse model. Mice were injected with PBS (Group 1), or 6×25 mg/kg ASOs as follows: ASO-1 control (Group 2), ASO-139 control (Group 4), ASO-963 (Group 7), and ASO-1133 (Group 8). Subcutaneous dosing occurred on days 0, 3, 7, 10, 14, and 21, and HBsAg was measured weekly at various time points.

[0072] FIG. 26 shows the effects of ASO-965 and ASO-1134 on HBsAg levels in plasma in AAV-HBV mouse model. Mice were injected with PBS (Group 1) or 6×25 mg/kg ASOs as follows: ASO-1 control (Group 2), ASO-139 control (Group 4), ASO-965 (Group 9), and ASO-1134 (Group 10). Subcutaneous dosing occurred on days 0, 3, 7, 10, 14, and 21, and HBsAg was measured weekly at various time points.

[0073] FIG. 27 shows exemplary ASO molecules with a LNA modification patterns from the parental constructs ASO-706 and ASO-707. Figure discloses SEQ ID NOS 727, 1005-1010, 728, and 1188-1193, respectively, in order of appearance.

[0074] FIG. 28 shows exemplary ASO molecules with a 2×LNA modification patterns from the parental strain ASO-677. Figure discloses SEQ ID NOS 1021-1028, respectively, in order of appearance.

[0075] FIG. 29 shows exemplary ASO molecules with a 2×LNA modification patterns from the parental strain ASO-677. Figure discloses SEQ ID NOS 1029-1036, respectively, in order of appearance.

[0076] FIG. 30 shows exemplary ASO molecules with a 2×LNA modification patterns from the parental strain ASO-677. Figure discloses SEQ ID NOS 1037-1044, respectively, in order of appearance.

[0077] FIG. 31 shows exemplary ASO molecules with a 2×LNA modification patterns from the parental strain ASO-677. Figure discloses SEQ ID NOS 1045-1052, respectively, in order of appearance.

[0078] FIG. 32 shows exemplary ASO molecules with a 2×LNA modification patterns from the parental strain ASO-677. Figure discloses SEQ ID NOS 1053-1059, respectively, in order of appearance.

[0079] FIG. 33 shows exemplary ASO molecules with a 1×LNA modification patterns from the parental strain ASO-677. Figure discloses SEQ ID NOS 698, and 1060-1067, respectively, in order of appearance.

[0080] FIG. 34 shows exemplary ASO molecules based on ASO-1 designed using a 3′ abasic walk. Figure discloses SEQ ID NOS 2, and 784-788, respectively, in order of appearance.

[0081] FIG. 35 shows the results of % inhibition in RNaseH activity after treatment of the ASOs prepared using a 3′ wing abasic walk based on ASO-1 at 0.1, 0.2, 1, 2, 3, 4, 5, 10, 20, 30, 100, and 200 nM.

[0082] FIG. 36 shows the results of % viability after treatment of the ASOs prepared using a 3′ wing abasic walk based on ASO-1 at 0.1, 0.2, 1, 2, 3, 4, 5, 10, 20, 30, 100, and 200 nM.

[0083] FIG. 37 shows exemplary ASO molecules produced from the parental strain ASO-1 with 2′-OMe (abasic monomer 1) or 2′deoxy abasic (abasic monomer 2) monomer modifications in the gap regions and additional LNA modifications in various positions. Figure discloses SEQ ID NOS 2, 140, 697-698, 1057-1058, 728, 1213-1214, and 1212, respectively, in order of appearance.

[0084] FIG. 38 shows the effects of ASO-1, ASO-139, and ASO-677 on HBsAg levels in plasma in AAV-HBV mouse model. Mice were injected with PBS (Group 1), and 6×40 mg/kg ASOs including ASO-1 control (Group 2), ASO-139 control (Group 3), and ASO-677 (Group 4) on days 0, 3, 7, 10, 14, and 21, and HBsAg was measured weekly at various time points.

[0085] FIG. 39 shows the effects of ASO-1, ASO-139, and ASO-677 on Alanine Aminotransferase (ALT) activity in plasma in a mouse model. Mice were injected with PBS (Group 1), and 6×40 mg/kg ASOs including ASO-1 control (Group 2), ASO-139 control (Group 3), and ASO-677 (Group 4) on days 0, 3, 7, 10, 14, and 21, and ALT was measured weekly at various time points.

[0086] FIG. 40 shows the tissue concentrations of ASO-1, ASO-139, and ASO-677 in the liver and the kidney of a mouse model. Mice were injected with 40 mg/kg of ASO-1 control, ASO-139 control, or ASO-677 on days 0, 3, 7, 10, 14, and 21, and tissues were collected on Day 28 and ASO concentrations in livers and kidneys were measured by LCMS.

[0087] FIG. 41 shows the effects of ASO-1, ASO-139, and ASO-1036 on HBsAg levels in plasma in AAV-HBV mouse model. Mice were injected with PBS (Group 1), and 6×25 mg/kg ASOs including ASO-1 control (Group 2), ASO-139 control (Group 3), and ASO-1036 (Group 4) on days 0, 3, 7, 10, 14, and 21, and HBsAg was measured weekly at various time points.

[0088] FIG. 42 shows the effects of ASO-1, ASO-139, and ASO-1036 on Alanine Aminotransferase (ALT) activity in plasma in AAV-HBV mouse model. Mice were injected with PBS (Group 1), and 6×25 mg/kg ASOs including ASO-1 control (Group 2), ASO-139 control (Group 3), and ASO-1036 (Group 4) on days 0, 3, 7, 10, 14, and 21, and ALT was measured weekly at various time points.

[0089] FIG. 43 shows the effects of ASO-1, ASO-139, and ASO-1037 on HBsAg levels in plasma in AAV-HBV mouse model. Mice were injected with PBS (Group 1), and 6×25 mg/kg ASOs including ASO-1 control (Group 2), ASO-139 control (Group 3), and ASO-1037 (Group 4) on days 0, 3, 7, 10, 14, and 21, and HBsAg was measured weekly at various time points.

[0090] FIG. 44 shows the effects of ASO-1, ASO-139, and ASO-1037 on Alanine Aminotransferase (ALT) activity in plasma in AAV-HBV mouse model. Mice were injected with PBS (Group 1), and 6×25 mg/kg ASOs including ASO-1 control (Group 2), ASO-139 control (Group 3), and ASO-1037 (Group 4) on days 0, 3, 7, 10, 14, and 21, and ALT was measured weekly at various time points.

[0091] FIG. 45 shows the effects of ASO-1, ASO-139, and ASO-707 on HBsAg levels in plasma in AAV-HBV mouse model. Mice were injected with PBS (Group 1), and 6×25 mg/kg ASOs including ASO-1 control (Group 2), ASO-139 control (Group 3), and ASO-707 (Group 4) on days 0, 3, 7, 10, 14, and 21, and HBsAg was measured weekly at various time points.

[0092] FIG. 46 shows the effects of ASO-1, ASO-139, and ASO-707 on Alanine Aminotransferase (ALT) activity in plasma in AAV-HBV mouse model. Mice were injected with PBS (Group 1), and 6×25 mg/kg ASOs including ASO-1 control (Group 2), ASO-139 control (Group 3), and ASO-707 (Group 4) on days 0, 3, 7, 10, 14, and 21, and ALT was measured weekly at various time points.

[0093] FIG. 47 shows the tissue concentrations of ASO-1, ASO-139, and ASO-707 in the livers and the kidneys of AAV-HBV mouse model. Mice were injected with 6×25 mg/kg of ASO-1 control, ASO-139 control, or ASO-707 on days 0, 3, 7, 10, 14, and 21, and tissues were collected on day 28 and ASO concentrations were measured using LCMS.

[0094] FIG. 48 shows the effects of ASO-139 and ASO-1192 on HBsAg levels in plasma in AAV-HBV mouse model. Mice were injected with PBS (Group 1), and 2×25 mg/kg ASOs including ASO-139 control (Group 2), and ASO-1192 (Group 3) on days 0, 3, and HBsAg was measured weekly at various time points.

[0095] FIG. 49 shows the effects ASO-139 and ASO-1192 on Alanine Aminotransferase (ALT) activity in plasma in AAV-HBV mouse model. Mice were injected with PBS (Group 1), and 2×25 mg/kg ASOs including ASO-139 control (Group 2), and ASO-1192 (Group 3) on days 0, 3, and ALT was measured weekly at various time points.

[0096] FIG. 50 shows the effects of ASO-1, ASO-139, and ASO-676 on HBsAg levels in plasma in AAV-HBV mouse model. Mice were injected with f PBS (Group 1), and 6×25 mg/kg ASOs including ASO-1 control (Group 2), ASO-139 control (Group 3), and ASO-676 (Group 4) on days 0, 3, 7, 10, 14, and 21, and HBsAg was measured weekly at various time points.

[0097] FIG. 51 shows the effects of ASO-1, ASO-139, and ASO-676 on Alanine Aminotransferase (ALT) activity in plasma in AAV-HBV mouse model. Mice were injected with PBS (Group 1), and 6×25 mg/kg ASOs including ASO-1 control (Group 2), ASO-139 control (Group 3), and ASO-676 (Group 4) on days 0, 3, 7, 10, 14, and 21, and ALT was measured weekly at various time points.

[0098] FIG. 52A-52D show the effects of ASO-1 and ASO-676 on IL-12/IL-23p40 and IP-10 levels in the plasma and liver of hTLR8 knock in mouse model. FIG. 52A shows concentration of IL-12/IL-23p40 in mouse plasma after treatment with PBS, ASO-1, or ASO-676. FIG. 52B shows concentration of IP-10 (CXCL10) in mouse plasma after treatment with PBS, ASO-1, or ASO-676. FIG. 52C shows concentration of IL-12/IL-23p40 in mouse liver after treatment with PBS, ASO-1, or ASO-676. FIG. 52D shows concentration of IP-10 (CXCL10) in mouse liver after treatment with PBS, ASO-1, or ASO-676. For each assessment, mice were injected with PBS (Group 1), and single dose 40 mg/kg ASOs including ASO-1 control (Group 2), or ASO-676 (Group 3) on days 0, and IL-12/IL23p40 or IP-10 (CXCL10) concentrations were measured 4 hours following the treatment.

[0099] FIG. 53 shows the effects of ASO-139 and ASO-1191 on HBsAg levels in plasma in AAV-HBV mouse model. Mice were injected with PBS (Group 1), and 2×25 mg/kg ASOs including ASO-139 control (Group 2), and ASO-1191 (Group 3) on days 0 and 3 and HBsAg was measured weekly at various time points.

[0100] FIG. 54 shows the effects of ASO-139 and ASO-1191 on Alanine Aminotransferase (ALT) activity in plasma in AAV-HBV mouse model. Mice were injected with PBS (Group 1), and 2×25 mg/kg ASOs including ASO-139 control (Group 2), and ASO-1191 (Group 3) on days 0 and 3 and ALT was measured weekly at various time points.

[0101] FIG. 55A-55D show the effects of ASO-1 and ASO-1191 on IL-12/IL-23p40 and IP-10 levels in the plasma and liver of hTLR8 knock in mouse model. FIG. 55A shows concentration of IL-12/IL-23p40 in mouse plasma after treatment with PBS, ASO-1, or ASO-1191. FIG. 55B shows concentration of IP-10 (CXCL10) in mouse plasma after treatment with PBS, ASO-1, or ASO-1191. FIG. 55C shows concentration of IL-12/IL-23p40 in mouse liver after treatment with PBS, ASO-1, or ASO-1191. FIG. 55D shows concentration of IP-10 (CXCL10) in mouse liver after treatment with PBS, ASO-1, or ASO-1191. For each assessment, mice were injected with PBS (Group 1) and single dose of 40 mg/kg ASOs including, ASO-1 control (Group 2), or ASO-676 (Group 3) on days 0, and IL-12/IL23p40 or IP-10 (CXCL10) concentrations in plasma and liver were measured 4 hours following the treatment.

[0102] FIG. 56 shows the effects of ASO-139 and ASO-1193 on HBsAg levels in plasma in AAV-HBV mouse model. Mice were injected with PBS (Group 1), and 2×25 mg/kg ASOs including ASO-139 control (Group 2), and ASO-1193 (Group 3) on days 0 and 3 and HBsAg was measured weekly at various time points.

[0103] FIG. 57 shows the effects of ASO-139 and ASO-1193 on Alanine Aminotransferase (ALT) activity in plasma in AAV-HBV mouse model. Mice were injected with PBS (Group 1), and 2×25 mg/kg ASOs including ASO-139 control (Group 2), and ASO-1193 (Group 3) on days 0 and 3 and ALT was measured weekly at various time points.

[0104] FIG. 58A-58D show the effects of ASO-1 and ASO-1193 on IL-12/IL-23p40 and IP-10 levels in the plasma and liver of hTLR8 knock in mouse model. FIG. 58A shows concentration of IL-12/IL-23p40 in mouse plasma after treatment with PBS, ASO-1, or ASO-1193. FIG. 58B shows concentration of IP-10 (CXCL10) in mouse plasma after treatment with PBS, ASO-1, or ASO-1193. FIG. 58C shows concentration of IL-12/IL-23p40 in mouse liver after treatment with PBS, ASO-1, or ASO-1193. FIG. 58D shows concentration of IP-10 (CXCL10) in mouse liver after treatment with PBS, ASO-1, or ASO-1193. For each assessment, mice were injected with PBS (Group 1), and single dose 40 mg/kg ASOs including ASO-1 control (Group 2), or ASO-676 (Group 3) on days 0, and IL-12/IL23p40 or IP-10 (CXCL10) concentrations were measured 4 hours following the treatment.

[0105] FIG. 59 shows exemplary ASO molecules with LNA modification patterns based on the parental construct ASO-707. Figure discloses SEQ ID NOS 1217, 1212, 1218, 1213-1214, and 1220, respectively, in order of appearance.

[0106] FIG. 60 shows exemplary ASO molecules with LNA modification patterns (including a single LNA) based on the parental construct ASO-707. Figure discloses SEQ ID NOS 1221-1230, respectively, in order of appearance.

[0107] FIG. 61 shows exemplary ASO molecules with LNA modification patterns (including two LNAs) based on the parental construct ASO-707. Figure discloses SEQ ID NOS 1231-1240, respectively, in order of appearance.

[0108] FIG. 62 shows exemplary ASO molecules with LNA modification patterns (including two LNAs) based on the parental construct ASO-707. Figure discloses SEQ ID NOS 1241-1250, respectively, in order of appearance.

[0109] FIG. 63A-63D show the effects of ASO-1 and ASO-677 on IL-12/IL-23p40, TNF alpha and IP-10 levels in the plasma and liver of hTLR8 knock in mouse model. FIG. 63A shows concentration of IL-12/IL-23p40 in mouse plasma after treatment with PBS, ASO-1, or ASO-677. FIG. 63B shows concentration of IL-12/IL-23p40 in mouse liver after treatment with PBS, ASO-1, or ASO-677. FIG. 63C shows concentration of IP-10 (CXCL10) in mouse liver after treatment with PBS, ASO-1, or ASO-677. FIG. 63D shows concentration of TNF alpha in mouse liver after treatment with PBS, ASO-1, or ASO-677. For each assessment, mice were injected with PBS (Group 1), and single dose 40 mg/kg ASOs including ASO-1 control (Group 2), or ASO-677 (Group 3) on days 0, and IL-12/IL23p40 or IP-10 (CXCL10) or TNF alpha concentrations were measured 4 hours following the treatment.

[0110] FIG. 64 shows 5′mono GalNAc ASO Day 7 AAV-HBV Mouse Study Results. The provided results show HBsAg levels, which were significantly lower in those ASOs containing a mono GalNAc relative to the reference ASOs (ASO-1 and ASO-139).

[0111] FIG. 65 shows unconjugated ASO Day 7 AAV-HBV Mouse Study Results. The provided results show HBsAg levels, which were modestly better for some of the tested ASOs relative to the reference ASOs (ASO-1 and ASO-139).

[0112] FIG. 66 shows ASO Day 7 AAV-HBV Mouse Study Results. The provided results show HBsAg levels. Several of the tested unconjugated ASOs, including ASO-1191, ASO-1197, ASO-1192, and ASO-1193, outperformed the reference ASOs (ASO-1 and ASO-139). Two 5′ Mono GalNAc conjugated ASOs ASO-1179 and ASO-1181 are among the most potent ASOs, outperforming ASO-1 and ASO-139.

[0113] FIG. 67 shows the results of an RNaseH biochemistry assay. The electrophoresis gel patterns clearly differentiated ASOs with abasic modifications from two control ASOs without abasic modification, thus indicating that abasic modifications altered the enzyme cleavage pattern.

[0114] FIG. 68 shows in vitro and in vivo activity data obtained for ASO-1196 (SEQ ID NO: 1217).

[0115] FIG. 69 shows in vitro and in vivo activity data obtained for ASO-1197 (SEQ ID NO: 1218).

[0116] FIG. 70 shows result from a PD study in mice with a hTLR8 knock-in gene. ASOs with monomeric or dimeric GalNAc (specifically, GalNAc 4) were administered and Interferon-α and Interferon-β levels were assessed. The result indicate the monomeric GalNAc strikes a good balance between RNaseH (shown in other figures) and immune response. Figure discloses SEQ ID NOS 7, and 672-677, respectively, in order of appearance.

### DETAILED DESCRIPTION

[0117] The present disclosure is directed to modified antisense oligonucleotides (ASOs) and pharmaceutical compositions comprising the same. The present disclosure is also directed to methods and uses of the antisense oligonucleotides and pharmaceutical compositions for treating or preventing hepatitis B virus (HBV) infection in particular.

[0118] The disclosed ASOs can contain 14-23 nucleotide units, and the ASOs can contain: (a) a central region comprising 6 or more contiguous DNA nucleosides, (b) a 5′-wing region comprising 2 to 7 locked nucleosides or 2′ substituted nucleosides, and (c) a 3′-wing region comprising 2 to 7 locked nucleosides or 2′ substituted nucleosides.

[0119] Without being bound by this theory, the mechanisms of action for the ASO are thought to be twofold: 1) ASO hybridizes to target RNA through Watson-Crick base pairing. The DNA-RNA heteroduplex would recruit RNase H in the cell which subsequently cleaves the RNA in the heteroduplex; 2) ASO with certain sequence motifs and chemical modifications are recognized by Pattern Recognition Receptors (PRRs) of innate immune system. PRRs are proteins capable of recognizing molecules frequently found in pathogens (the so-called Pathogen-Associated Molecular Patterns-PAMPs), or molecules released by damaged cells (the Damage-Associated Molecular Patterns-DAMPs). Toll-like receptors (TLRs) are a family of 13 type 1 transmembrane proteins that belong to PRRs. Nucleic acids (NAs) are sensed by a subfamily of TLRs including TLR3, TLR7, TLR8, TLR9, and TLR13. These NA-sensing TLRs are localized in the endosomal compartment to prevent hazardous autoimmune responses.

[0120] Human TLR8 (hTLR8) is an endosomal receptor primarily expressed in monocytes/macrophages and myeloid dendritic cells. It recognizes viral and bacterial RNA and triggers production of various antiviral and immunomodulatory cytokines, including IL-12, IL-18, TNF-α, and IFN-γ. TLR8 agonists directly activate and promote the maturation of professional antigen-presenting cells (e.g. myeloid dendritic cells), and stimulate antigen-specific T-cell responses, including a CD8+ T-cell response to infected hepatocytes in chronic hepatitis B patients.

[0121] Previous studies have shown that HBV ASO GSK-836 with no GalNAc conjugation exhibited better clinical outcome than GSK-404 (the same ASO sequence and chemical modifications as GSK-836 but contains a GalNAc targeting group for hepatocyte delivery). In the Ph2b B-Clear Trial, 300 mg/week with loading doses for 24 weeks achieved 30% HBsAg<LLOQ at the end of dosing; 10% patients remained HBsAg<LLOQ after 24 weeks follow up. It was suggested that GSK-836 has human TLR8 agonist activity in addition to RNase H activity. Although the percent of patients who reached undetectable HBsAg is promising, there is likely room for improvement. Another area for improvement is the high percentage of non-responders in the treatment.

[0122] However, treatment of HBV with antisense oligonucleotides still exhibits some safety problems, including liver toxicity. In the GSK-836 Ph2b B-Clear trial, 9% of the patients dropped out of treatment due to drug adverse events. There is room for improvement in the GSK-836 safety profile.

[0123] Thus, there is a need in the art to discover antisense oligonucleotides that have improved safety profiles, and increased efficacy. In this application, at least one, and up to three aspects of the HBV ASO profile (RNase H activity, hTLR8 activity and liver safety) have been improved over GSK-836 through discovery of novel sequences and application of unique chemistries. Discovery of sequences and chemical modifications that improved one or more aspects of RNase H activity, hTLR8 activity and liver safety of ASO were unconventional and unexpected.

[0124] It is to be appreciated that certain aspects, modes, embodiments, variations and features of the present methods are described below in various levels of detail in order to provide a substantial understanding of the present technology. It is to be understood that the present disclosure is not limited to particular uses, methods, reagents, compounds, compositions or biological systems, which can, of course, vary. It is also to be understood that the terminology used herein for the purpose of describing particular embodiments only and is not intended to be limiting.

### I. Definitions

[0125] Unless defined otherwise, all technical and scientific terms used herein generally have the same meaning as commonly understood by one of ordinary skill in the art to which this technology belongs. The following references provide one of skill with a general definition of many of the terms used in this disclosure: Singleton et al., Dictionary of Microbiology and Molecular Biology (2nd ed. 1994); The Cambridge Dictionary of Science and Technology (Walker ed., 1988); The Glossary of Genetics, 5th Ed., R. Rieger et al., (eds.), Springer Verlag (1991); and Hale & Marham, The Harper Collins Dictionary of Biology (1991). As used herein, the following terms have the meanings ascribed to them below, unless specified otherwise. The terminology used herein is for the purpose of describing particular embodiments only and is not intended to be limiting of the disclosure.

[0126] Reference to “about” a value or parameter herein includes (and describes) variations that are directed to a recited value or parameter as well as the recited p value or parameter per se. The variations for the term “about” mean plus or minus ten percent (10%) of a value. Thus, for example, “about 100” refers to 100, as well as any number between 90 and 110.

[0127] It is understood that aspects and variations of the embodiments described herein include “consisting” and/or “consisting essentially of” aspects and variations. Throughout the description, where compositions are described as having, including, or comprising specific components, or where processes and methods are described as having, including, or comprising specific steps, it is contemplated that, additionally, there are compositions of the present disclosure that consist essentially of, or consist of, the recited components, and that there are processes and methods according to the present disclosure that consist essentially of, or consist of, the recited processing steps.

[0128] As used herein, the terms “abasic monomer,” “abasic site,” “abasic position,” and “abasic residue” may be used interchangeably and refer to a sugar-phosphate backbone (e.g., a modified sugar-phosphate backbone) that lacks a base (either a purine or pyrimidine or non-natural base). For the purposes of the present disclosure, an “abasic monomer,” “abasic site,” “abasic position,” and “abasic residue” can comprise various chemical groups (e.g., alkyl, cycloalkyl, alkoxy, hydrogen, etc.) at the 2′ position of the sugar. The modification at the 2′ position may include an alkyl or alkoxy that is attached at both the 2′ and 4′ position of the sugar (e.g., a 2′-O, 4′-C-methylene linker). For the purposes of the present disclosure, these terms are also intended to include any stereoisomers of the sugar-phosphate backbone lacking a base. Specific examples of abasic monomers include abasic monomer 1, abasic monomer 2, abasic monomer 3, and abasic monomer 4, which are disclosed herein.

[0129] The terms “individual,” “subject,” and “patient” are used interchangeably herein and refer to any individual mammal, e.g., bovine, canine, feline, equine, simian, porcine, camelid, bat, or human, being treated according to the disclosed methods or uses. In preferred embodiments, the subject is a human.

[0130] As used herein, the term “effective amount” refers to the amount of a compound (e.g., an ASO of the present disclosure) sufficient to effect beneficial or desired results. An effective amount can be administered in one or more administrations, applications, or dosages and is not intended to be limited to a particular formulation or administration route.

[0131] As used herein, the term “treating” includes any effect (e.g., lessening, reducing, modulating, ameliorating, or eliminating) that results in the improvement of the condition, disease, disorder, and the like, or ameliorating a symptom thereof.

[0132] As used herein, the terms “alleviate” and “alleviating” refer to reducing the severity of the condition, such as reducing the severity by, for example, at least 10%, 20%, 30%, 40%, 50%, 60%, 70%, 80%, 90%, or 95%.

[0133] As used herein, the term “pharmaceutical composition” refers to the combination of an active agent (e.g., an ASO disclosed herein) with a carrier, inert or active, making the composition especially suitable for diagnostic or therapeutic use in vivo or ex vivo.

[0134] As used herein, the term “pharmaceutically acceptable carrier” refers to any of the standard pharmaceutical carriers, such as a phosphate buffered saline solution, water, emulsions (e.g., such as an oil/water or water/oil emulsions), and various types of wetting agents. The compositions also can include stabilizers and preservatives. For examples of carriers, stabilizers and adjuvants, see, for example, Martin, Remington's Pharmaceutical Sciences, 15th Ed., Mack Publ. Co., Easton, PA [1975].

[0135] As used herein, the term “nucleobase” refers to a nitrogen-containing biological compound that forms a nucleoside. Examples of nucleobases include, but are not limited to, thymine, uracil, adenine, cytosine, guanine, and an analogue or derivative thereof.

[0136] For the purposes of the present disclosure, a DNA sequence that replaces all the U residues of an RNA sequence with T residues is “identical” to the RNA sequence, and vice versa. Accordingly, a sequence that is “identical to an RNA corresponding to” a DNA sequence constitutes the DNA sequence with all T replaced by U. The presence of modified nucleotides or 2′-deoxynucleotides in a sequence does not make a sequence not “identical to an RNA” but rather a modified RNA.

[0137] As used herein, “modified nucleotide” includes any nucleic acid or nucleic acid analogue residue that contains a modification or substitution in the chemical structure of an unmodified nucleotide base, sugar (including, but not limited to, 2′-substitution), or phosphate (including, but not limited to, alternate internucleotide linkers, such as phosphorothioates or the substitution of bridging oxygens in phosphate linkers with bridging sulfurs), or a combination thereof. Non-limiting examples of modified nucleotides are shown herein.

[0138] A target gene may be any gene in a cell or virus. Here, “target gene” and “target sequence” are used synonymously.

[0139] As used herein, a “conjugate” or “ligand” refers to any compound of molecule that is capable of interacting with another compound or molecule, directly or indirectly. The ligand may modify one or more properties of the ASO molecule to which it is attached, such as the pharmacodynamic, pharmacokinetic, binding, absorption, cellular distribution, cellular uptake, charge, and/or clearance properties of the ASO molecule. Non-limiting examples of such conjugates are described, e.g., in WO 2020/243490; WO 2020/097342; WO 2021/119325; PCT/US2021/019629; PCT/US2021/019628; PCT/US2021/021199; Sig. Transduct. Target Ther. 5 (101), 2020; ACS Chem. Biol. 10 (5), 1181-1187, 2015; J. Am. Chem. Soc. 136 (49), 16958-16961, 2014; Nucleic Acids Res. 42 (13), 8796-8807, 2014; Molec. Ther. 28 (8), 1759-1771, 2020; and Nucleic Acid Ther. 28 (3), 109-118, 2018, each of which is incorporated by reference herein.

[0140] As a general matter, compositions specifying a percentage are by weight unless otherwise specified. Further, if a variable is not accompanied by a definition, then the previous definition of the variable controls.

[0141] All publications and patents cited in this specification are herein incorporated by reference as if each individual publication or patent were specifically and individually indicated to be incorporated by reference and are incorporated herein by reference to disclose and describe the methods and/or materials in connection with which the publications are cited. The citation of any publication is for its disclosure prior to the filing date and should not be construed as an admission that the present disclosure is not entitled to antedate such publication by virtue of prior disclosure. Further, the dates of publication provided may be different from the actual publication dates that may need to be independently confirmed.

### II. Antisense Oligonucleotides (ASOs)

[0142] Compounds of the present disclosure include modified antisense oligonucleotides (ASOs). The ASO can comprise 18 to 23 nucleotide units, e.g., 18, 19, 20, 21, 22 or 23 nucleotide units. The ASO can be a gapmer that comprises three regions: a 5′-wing region (A′), which optionally comprises modified nucleotides; a central gap region (B′), which optionally comprises nucleotides of a different type from the wings, e.g., nucleotides capable of inducing RNase H cleavage; and a 3′-wing region (C′), which optionally comprises modified nucleotides. Generally, the 5′-wing region (A′) and the 3′-wing region (C′) will comprise modified nucleotides.

[0143] The disclosed ASOs can comprise at least one modified nucleotide such as 2′ substituted nucleosides, including, but not limited to, 2′-MOE, 2′-O-cyp, 2′-O-mcyp, and 2′-OMe; 3′-modified nucleosides, including, but not limited to 3′-xylo; 2′ and 3′ substituted nucleosides, including, but not limited to, 2′-OMe-3′-xylo; locked nucleosides, including, but not limited to, a locked nucleic acid, including, but not limited to, LNA, ScpBNA, AmNA, and GuNA; modified nucleobases, including, but not limited to, (8nh)G, (8nh)A, (2s)T, and (5oh)C; modified linkages; or a combination thereof. The disclosed ASOs can comprise at least one phosphorothioate linkage or stereo-defined phosphorothioate linkage. The disclosed ASOs can comprise a combination of at least one modified nucleotide and at least one phosphorothioate linkage or stereo-defined phosphorothioate linkage. The structures of the modified nucleotides and the stereo-defined phosphorothioate linkages are described further below. Preparation of the modified nucleotide monomers, including, but not limited to, 2′-O-cyp, 2′-O-mcyp, 2′-OMe, and 2′-OMe-3′-xylo monomers, is disclosed in PCT/US2023/078224 (WO 2024/097674).

### Modified Nucleotides, Nucleosides, Abasic Monomers, and Linkages

[0144] The 5′-wing region and the 3′-wing region can each independently comprise 1 to 7 deoxyribonucleotides or “nucleotides”, e.g., 1, 2, 3, 4, 5, 6 or 7 nucleotides. One or more of the nucleotides can be modified (e.g., 1, 2, 3, 4, 5, 6 or 7 of the nucleotides is/are modified). The 5′-wing region and the 3′-wing region can each independently comprise one or more locked nucleosides, 2′-substituted nucleosides, 3′-substituted nucleosides, or abasic monomers. The 5′-wing region and 3′-wing region can comprise one or more (e.g., 1, 2, 3, 4, 5, 6 or 7) locked nucleic acid, 2′-substituted nucleosides, 3′-substituted nucleosides, or abasic monomers. The locked nucleoside can contain a bridge between the 4′ and 2′ position of the sugar wherein the bridges comprise 2 to 4 optionally substituted atoms. For example, the locked nucleic acid is

[chemical structure]

### (LNA),

[chemical structure]

(ScpBNA or “cp”),

[chemical structure]

(AmNA when R is H; AmNA(N-Me) when R is CH₃; AmNA(N-alkyl) when R is C₁-C₆ alkyl);

[chemical structure]

### (GuNA); or

[chemical structure]

(GuNA(N—R)); wherein B is a nucleobase, R is H or C₁-C₆ alkyl and wherein [symbol] represents a phosphodiester linkage, a phosphorothioate linkage, a mesyl phosphoroamidate linkage, or H. All nucleosides in the 5′-wing region can be locked nucleosides. All nucleosides in the 3′-wing region can be locked nucleosides. The 5′-wing region and 3′-wing regions can each independently contain one or more locked nucleosides, such as one or two nucleosides selected from LNA, ScpBNA, AmNA, and GuNA.

[0145] Additionally or alternatively, at least one of the 2′-substituted nucleotides can comprise a nucleotide selected from

[chemical structure]

### (2′-O-methoxyethyl (“2′-MOE”)),

[chemical structure]

### (2′-O-cyclopropyl (“2′-O-cyp”)),

[chemical structure]

(2′-O-methylcyclopropyl (“2′-O-mcyp”)), and 2′-O-methyl (“2′-OMe”) or any combination thereof, wherein [symbol] represents a phosphodiester linkage, a phosphorothioate linkage, a mesyl phosphoroamidate linkage, or H. Additionally or alternatively, at least one of the 3′-modified nucleosides can comprise a 3′-xylo nucleotide, such as a 2′-OMe-3′-xylo (i.e., “ImX”)

[chemical structure]

wherein [symbol] represents a phosphodiester linkage, a phosphorothioate linkage, a mesyl phosphoroamidate linkage, or H.

[0146] Additionally or alternatively, the 5′-wing region and the 3′-wing region can each comprise at least one ribonucleotide. Additionally or alternatively, the 5′-wing region and the 3′-wing region can each comprise at least one 2,6-diaminopurine (“DAP”),

[chemical structure]

wherein [symbol] represents a phosphodiester linkage, a phosphorothioate linkage, a mesyl phosphoroamidate linkage, or H.

[0147] Additionally or alternatively, the 5′-wing region and the 3′-wing region can each comprise at least one of the modified nucleotides including those with the structure of

[chemical structure]

(8-amino-guanosine (“(8nh)G”),

[chemical structure]

(2-thio-thymine (“(2s)T”)),

[chemical structure]

(8-amino-adenosine (“(8nh)A”)),

[chemical structure]

or hydroxy-cytosine (“(5oh)C”), wherein [symbol] represents a phosphodiester linkage, a phosphorothioate linkage, a mesyl phosphoroamidate linkage, or H.

[0148] Additionally or alternatively, the 5′-wing region, the 3′-wing region, and/or the central region can each independently comprise at least one abasic monomer. The at least one abasic monomer can have a structure of

[chemical structure]

wherein R is H, alkyl (e.g., CH₃), an alkoxy (e.g., O—CH₃ or MOE), O-cyp, or O-mcyp or R can connect to the 4′ of the sugar to form a locked abasic monomer, and wherein [symbol] represents a phosphodiester linkage, a phosphorothioate linkage, a mesyl phosphoroamidate linkage, or H. Additionally or alternatively, the at least one abasic monomer can comprise an abasic monomer selected from

[chemical structure]

(abasic monomer 1; i.e., a 2′-OMe abasic monomer),

[chemical structure]

(abasic monomer 2; i.e., a 2′-deoxy abasic monomer),

[chemical structure]

(abasic monomer 3; i.e., a 2′-MOE abasic monomer), and

[chemical structure]

(abasic monomer 4; i.e., locked abasic monomer), or any combination thereof, wherein [symbol] represents a phosphodiester linkage, a phosphorothioate linkage, a mesyl phosphoroamidate linkage, or H.

[0149] Additionally or alternatively, the 5′-wing region and the 3′-wing region can each independently comprise 1 to 6 (e.g., 1, 2, 3, 4, 5 or 6) phosphorothioate (“ps”) internucleoside linkages. At least one of the ps internucleoside linkages can comprise a stereo-defined ps internucleoside linkage. The stereo defined ps internucleoside linkage can be an S-ps internucleoside linkage or an R-ps nucleoside linkage.

[0150] The 5′-wing region of the disclosed ASOs can include 1 to 7 phosphorothioate-linked locked nucleosides, S phosphorothioate-linked locked nucleosides, R phosphorothioate-linked locked nucleosides, phosphodiester-linked locked nucleosides, or any combination thereof. The 5′-wing region of the disclosed ASOs can include 2 to 6 phosphorothioate-linked 2′ substituted nucleosides, S-phosphorothioate-linked 2′ substituted nucleosides, R-phosphorothioate-linked locked nucleosides, phosphodiester-linked 2′ substituted nucleosides, or any combination thereof. The 5′-wing region of the disclosed ASOs can include 2 to 7 phosphorothioate-linked 3′ substituted nucleosides, S phosphorothioate-linked 3′-modified nucleosides, R phosphorothioate-linked locked nucleosides, phosphodiester-linked 3′ substituted nucleosides, or any combination thereof. The 5′-wing region can further comprise one or more RNA nucleosides or DNA nucleosides, wherein the RNA nucleoside and DNA nucleoside are not locked nucleosides, 2′ substituted nucleosides, or 3′ substituted nucleosides. At least two nucleosides of the 5′-wing region can be linked by a phosphorothioate linker. At least 2, 3, 4, 5, 6 or 7 nucleosides of the 5′-wing region are linked by a phosphorothioate linker.

[0151] The 3′-wing region of the disclosed ASOs can include 1 to 7 phosphorothioate-linked locked nucleosides, S phosphorothioate-linked locked nucleosides, R phosphorothioate-linked locked nucleosides, phosphodiester-linked locked nucleosides, or any combination thereof. The 3′-wing region of the disclosed ASOs can include 2 to 7 phosphorothioate-linked 2′ substituted nucleosides, S phosphorothioate-linked 2′ substituted nucleosides, R phosphorothioate-linked locked nucleosides, phosphodiester-linked 2′ substituted nucleosides, or any combination thereof. The 3′-wing region of the disclosed ASOs can include 2 to 7 phosphorothioate-linked 3′ substituted nucleosides, S phosphorothioate-linked 3′ substituted nucleosides, R phosphorothioate-linked locked nucleosides, phosphodiester-linked 3′ substituted nucleosides, or any combination thereof. The 3′-wing region can further comprise one or more RNA nucleosides or DNA nucleosides, wherein the RNA nucleoside and DNA nucleoside are not locked nucleosides, 2′ substituted nucleosides, or 3′ substituted nucleosides. At least two nucleosides of the 3′-wing region can be linked by a phosphorothioate linker. At least 2, 3, 4, 5, 6 or 7 nucleosides of the 3′-wing region are linked by a phosphorothioate linker.

[0152] In some embodiments, a mesyl phosphoramidate linkage (“MsPA”) (or an analog thereof), as shown below, can be used alone or in combination with phosphorothioate or phosphodiester linkages. Accordingly, the disclosed ASOs may comprise 1, 2, 3, 4, 5 or more mesyl phosphoramidate linkages (or analogs thereof). The mesyl phosphoramidate linkages can be in the central region or in either or both of the wing regions. For example, in some embodiments, the central gap region can comprise 1, 2, 3, 4, 5, or more contiguous DNA nucleotides, linked by phosphodiester internucleoside linkages or phosphorothioate (“ps”) internucleoside linkages. Additionally or alternatively, the central gap region can comprise 1, 2, 3, 4, 5, or more contiguous DNA nucleotides, linked by mesyl phosphoramidate linkages, or analogs of mesyl phosphoramidate linkages.

[0153] The central region can include one or more modified nucleotides, phosphorothioate internucleoside linkages, mesyl phosphoramidate linkages, or any combination thereof. Further, the central region can include one or more modified nucleotides where the central region is capable of inducing RNase H cleavage. The central region can include one or more modified nucleotides where the central region is capable of activating toll-like receptor 8 (TLR8). The central region can include one or more modified nucleotides where the central region is capable of inducing activation of TLR8. The central region can include one or more modified nucleotides where the central region is capable of reducing caspase activity. The central region can include one or more modified nucleotides or one or more phosphorothioate internucleoside linages or one or more mesyl phosphoramidate linkages to reduce toxicity of the ASO and to improve potency of the treatment.

[0154] The central region can include one or more modified nucleotides having a modified nucleobase, or no base at all (e.g., an abasic monomer). Abasic monomers included in the central region can be deoxy monomers or comprise an alternative modification at the 2′ position (e.g., a 2′-OMe, or a 2′-MOE). The central region can comprise 5, 6, 7, 8, 9, 10, 11 or 12 contiguous DNA nucleosides. 1, 2, 3, 4, 5, 6, 7, 8, 9, 10, 11, or 12 of the DNA nucleosides in the central gap region can be modified. At least one of the modified nucleotides can comprise 2′-substituted nucleotides, including, but not limited, to a structure of 2′-O-cyp, 2′-O-mcyp, 2′-OMe, 2′-MOE or

[chemical structure]

(2′-O-methyl-3′-xylo (“2′-OMe-3′-xylo”)), wherein [symbol] represents a phosphodiester linkage, a phosphorothioate linkage, or a mesyl phosphoroamidate linkage. Additionally or alternatively, at least one of the modified nucleotides can comprise a structure of

[chemical structure]

(8-amino-guanosine (“(8nh)G”),

[chemical structure]

(2-thio-thymine (“(2s)T”)),

[chemical structure]

(8-amino-adenosine (“(8nh)A”)), or

[chemical structure]

(5-hydroxy-cytosine (“(5oh)C”), wherein [symbol] represents a phosphodiester linkage, a phosphorothioate linkage, or a mesyl phosphoroamidate linkage. Additionally or alternatively, the central region can comprise at least one locked nucleoside, including, but not limited to, LNA, ScpBNA, AmNA, or GuNA. Additionally or alternatively, the central gap region can comprise at least one ribonucleotide.

[0155] The central region can comprise at least one abasic monomer (e.g., 1, 2, 3, 4, or more abasic monomers). The at least one abasic monomer can have a structure of

[chemical structure]

wherein R is H, alkyl (e.g., CH₃), an alkoxy (e.g., O—CH₃ or MOE), O-cyp, or O-mcyp or R can connect to the 4′ of the sugar to form a locked abasic monomer, and wherein [symbol] represents a phosphodiester linkage, a phosphorothioate linkage, or a mesyl phosphoroamidate linkage. Additionally or alternatively, the at least one abasic monomer can comprise an abasic monomer selected from

[chemical structure]

(abasic monomer 1; i.e., a 2′-OMe abasic monomer),

[chemical structure]

(abasic monomer 2; i.e., a 2′-deoxy abasic monomer),

[chemical structure]

(abasic monomer 3; i.e., a 2′-MOE abasic monomer), and

[chemical structure]

(abasic monomer 4; i.e., locked abasic monomer), or any combination thereof, wherein [symbol] represents a phosphodiester linkage, a phosphorothioate linkage, or a mesyl phosphoroamidate linkage. The position of the abasic monomer within the central region can vary. For example, the central region may comprise an abasic monomer at position 1, 2, 3, 4, 5, 6, 7, 8, 9, or 10 of the central region (which may be defined by DNA residues) relative to the 5′ end of the central region. Depending on the size of the 5′ wing, position 1, 2, 3, 4, 5, 6, 7, 8, 9, or 10 of the central region may correspond to different positions within the ASO. For example, many of the ASOs disclosed herein comprise 5 nucleotides in the 5′ wing, and therefore positions 1, 2, 3, 4, 5, 6, 7, 8, 9, and 10 of the central region correspond to positions 6, 7, 8, 9, 10, 11, 12, 13, 14, and 15 of the ASO, respectively.

[0156] Additionally or alternatively, the central region can comprise 1 to 11 (e.g., 1, 2, 3, 4, 5, 6, 7, 8, 9, 10 or 11) phosphorothioate (“ps”) internucleoside linkages. At least one of the ps internucleoside linkages can comprise a stereo-defined ps internucleoside linkage. The stereo defined ps internucleoside linkage can be an S-ps internucleoside linkage or an R-ps nucleoside linkage. Additionally or alternatively, the central region can comprise 1 to 11 (e.g., 1, 2, 3, 4, 5, 6, 7, 8, 9, 10 or 11) mesyl phosphoramidate linkages. The central region can comprise at least one ps internucleoside linkage and at least one mesyl phosphoramidate linkage.

[0157] The central region of the disclosed ASOs can comprise at least 5 contiguous phosphorothioate-linked DNA nucleosides. At least 2, 3, 4, 5, or 6 nucleotides of the central region can be linked by a phosphorothioate linker. 1, 2, 3, 4, 5, or 6 of the nucleotides of the central region can be linked by a mesyl phosphoramidate linkage. The central region of the ASO may not include mesyl phosphoramidate linkages between the nucleotides of the central region. A DNA nucleoside of the central region can be linked to a nucleoside of the 5′-wing region by a phosophorothioate linker. A DNA nucleoside of the central region can be linked to a nucleoside of the 3′-wing region by a phosphorothioate linker. The central region can comprise 8 to 12 contiguous DNA nucleotides.

[0158] For the purposes of the present disclosure, the disclosed ASOs can comprise at least 1, at least 2, at least 3, at least 4, or at least 5 or more modifications of 2′-MOE, 2′-O-cyp, 3′-xylo, 2′-O-mcyp, 2′-OMe, 2′-OMe-3′-xylo, or any combination thereof. Additionally or alternatively, the disclosed ASOs can comprise at least 1, at least 2, at least 3, at least 4, or at least 5 or more modified nucleobases of (8nh)G, (2s)T, (8nh)A, (5oh)C, or a combination thereof. Additionally or alternatively, the disclosed ASOs can comprise at least 1, at least 2, at least 3, at least 4, or at least 5 or more abasic monomers. In some embodiments, the disclosed ASOs can comprise 1, 2, 3, 4, or 5 or more abasic monomers. Additionally or alternatively, the disclosed ASOs can comprise 1, 2, 3, 4, 5, 6, 7, 8, 9, 10, 11, 12, 13, 14, 15 or more ps internucleoside linkages, S-ps internucleoside linkages, R-ps internucleoside linkages, mesyl phosphoramidate linkages, or any combination thereof. In some embodiments, the modifications can be in the gap region or the wing region.

[0159] The gapmer ASO compounds of the disclosure include compounds of formula (I): A′-B′—C′, wherein A′ and C′ each can independently comprise 2 to 7 nucleotides, with one or more being a modified nucleoside, and B′ can comprise 6 or more DNA nucleosides and/or abasic monomers linked by phosphodiester, phosphorothioate, or mesyl phosphoramidate linkages. B′ can comprise one or more modified DNA nucleosides or abasic monomers (e.g., abasic monomer 1, abasic monomer 2, abasic monomer 3, or abasic monomer 4). The modified DNA nucleoside can be selected from locked nucleosides, 2′ substituted nucleosides, or 3′ substituted nucleoside. The locked nucleosides can be selected from LNA, ScpBNA, AmNA, and GuNA. The 2′ substituted nucleosides can be selected from 2′-MOE, 2′-O-cyp, 2′-O-mcyp, 2′-OMe, and 2′—OMe-3′-xylo. The 3′ substituted nucleoside can be selected from 3′-xylo. Additional modified nucleosides include, but are not limited to, (8nh)G, (2s)T, (8nh)A, and (5oh)C.

[0160] The number of nucleotides and/or nucleosides in A′, B′, and C′ can be selected from the following group (A′: B′: C′): (6:5:7), (7:5:6), (7:5:7), (5:6:7), (6:6:6), (6:6:7), (7:6:5), (7:6:6), (7:6:7), (4:7:7), (5:7:6), (5:7:7), (6:7:5), (6:7:6), (6:7:7), (7:7:4), (7:7:5), (7:7:6), (7:7:7), (3:8:7), (4:8:6), (4:8:7), (5:8:5), (5:8:6), (5:8:7), (6:8:4), (6:8:5), (6:8:6), (6:8:7), (7:8:3), (7:8:4), (7:8:5), (7:8:6), (7:8:7), (2:9:7), (3:9:6), (3:9:7), (4:9:5), (4:9:6), (4:9:7), (5:9:4), (5:9:5), (5:9:6), (5:9:7), (6:9:3), (6:9:4), (6:9:5), (6:9:6), (6:9:7), (7:9:2), (7:9:3), (7:9:4), (7:9:5), (7:9:6), (7:9:7), (2:10:6), (2:10:7), (3:10:5), (3:10:6), (3:10:7), (4:10:4), (4:10:5), (4:10:6), (4:10:7), (5:10:3), (5:10:4), (5:10:5), (5:10:6), (5:10:7), (6:10:2), (6:10:3), (6:10:4), (6:10:5), (6:10:6), (6:10:7), (7:10:2), (7:10:3), (7:10:4), (7:10:5), (7:10:6), (2:11:6), (2:11:7), (3:11:5), (3:11:6), (3:11:7), (4:11:4), (4:11:5), (4:11:6), (4:11:7), (5:11:3), (5:11:4), (5:11:5), (5:11:6), (5:11:7), (6:11:2), (6:11:3), (6:11:4), (6:11:5), (6:11:6), (7:11:2), (7:11:3), (7:11:4), (7:11:5), (2:12:4), (2:12:5), (2:12:6), (2:12:7), (3:12:3), (3:12:4), (3:12:5), (3:12:6), (3:12:7), (4:12:2), (4:12:3), (4:12:4), (4:12:5), (4:12:6), (4:12:7), (5:12:2), (5:12:3), (5:12:4), (5:12:5), (5:12:6), (6:12:1), (6:12:2), (6:12:3), (6:12:4), and (6:12:5).

[0161] The 5′-wing region can comprise one or more locked nucleosides or 2′-substituted nucleosides. The 3′-wing region can comprise one or more locked nucleosides or 2′-substituted nucleosides. The central region can comprise one or more locked nucleosides or 2′-substituted nucleosides. The 5′-wing region, the 3′-wing region, the central gap region, or a combination thereof can comprise one or more (e.g., 1, 2, 3, 4, 5, 6, 7, 8, 9, 10, 11, 12, 13, 14, 15) locked nucleosides or 2′-substituted nucleosides. The locked nucleoside can contain a bridge between the 4′ and the 2′ position of the sugar wherein the bridges can comprise 2 to 4 optionally substituted atoms. Exemplary locked nucleosides include those discussed above. All nucleosides in the 5′-wing region can be locked nucleosides. The 5′-wing region can contain a locked nucleoside, such as one or two or more nucleosides selected from LNA, ScpBNA, AmNA, and GuNA. All nucleosides in the 3′-wing region can be locked nucleosides. The 3′-wing region can contain LNA and one or two or more nucleosides selected from ScpBNA, AmNA, and GuNA. Other nucleotides are included in PCT/JP2010/068409, US2012/0208991, PCT/JP2013/075370, US2015/0266917, PCT/JP2015/054308, US2017/0044528, PCT/JP2018/006061, US2020/0056178, PCT/JP2018/006062, and/or US2020/0055890, which are incorporated by reference in their entirety. One or more nucleotides in the 5′-wing and/or the 3′ wing region can each independently comprise one or more modified nucleosides.

[0162] The 5′-wing region can include one modified nucleotide (e.g., a 2′ substituted nucleoside or 3′ substituted nucleoside) at the first, second, third, fourth, fifth, sixth or seventh nucleoside position (from the 5′ end of ASO). The 5′-wing region can include more than one modified nucleotide at the first, second, third, fourth, fifth, sixth or seventh nucleoside position (from the 5′ end of ASO). The 5′-wing region can include seven modified nucleotides at the first, second, third, fourth, fifth, sixth and seventh nucleoside positions (from the 5′ end of ASO). The seven modified nucleotides can be 2′-O-methoxyethyl. The 5′-wing region can include one or more modified nucleotide of (8nh)G, (2s)T, (8nh)A, or (5oh)C at the first, second, third, fourth, fifth, sixth or seventh nucleoside position (from the 5′ end of ASO).

[0163] The 3′-wing region can include one modified nucleotide (e.g., a 2′ substituted nucleoside or 3′ substituted nucleoside) at the first, second, third, fourth, fifth, sixth or seventh nucleoside position (from the 5′ end of 3′-wing region). The 3′-wing region can include more than one modified nucleotide at the first, second, third, fourth, fifth, sixth or seventh nucleoside position (from the 5′ end of 3′-wing region). The 3′-wing region can include seven modified nucleotides at the first, second, third, fourth, fifth, sixth and seventh nucleoside positions (from the 5′ end of 3′-wing region). The seven modified nucleotides can be 2′-O-methoxyethyl. The modified nucleotides at the first, second, third, fourth, fifth and sixth nucleotide positions can be 2′-O-methoxyethyl, and the modified nucleotide at the seventh position can be 2′-O-cyclopropyl. The 3′-wing region can include one modified nucleotide of (8nh)G, (2s)T, (8nh)A, or (5oh)C at the first, second, third, fourth, fifth sixth or seventh nucleoside position (from the 5′ end of 3′-wing region).

[0164] The 5′-wing region can comprise one or more abasic monomers. The 3′-wing region can comprise one or more abasic monomers. The central region can comprise one or more abasic monomers. The 5′-wing region, the 3′-wing region, the central gap region, or a combination thereof can comprise one or more (e.g., 1, 2, 3, 4, 5, 6, 7, 8, 9, 10, 11, 12, 13, 14, 15) abasic monomers. Exemplary abasic monomers include those discussed above (i.e., abasic monomers 1-4). All positions in the 5′-wing region can be abasic monomers. The 5′-wing region can contain an abasic monomer, such as one or two or more abasic monomers selected from any one of abasic monomer 1, abasic monomer 2, abasic monomer 3, abasic monomer 4, or any combination thereof. The 3′-wing region can contain one or two or more abasic monomers selected from comprise any one of abasic monomer 1, abasic monomer 2, abasic monomer 3, abasic monomer 4, or any combination thereof.

[0165] The 3′-wing region can include one abasic monomer at the first, second, third, fourth, fifth, sixth or seventh position (from the 5′ end of 3′-wing region). The 3′-wing region can include more than one abasic monomers at the first, second, third, fourth, fifth, sixth or seventh nucleoside position (from the 5′ end of 3′-wing region). The abasic monomer can comprise any one of abasic monomer 1, abasic monomer 2, abasic monomer 3, abasic monomer 4, or any combination thereof.

[0166] The central gap region can include one or more modified nucleotide having a modified nucleobase. For example, the central region can include at least 1, at least 2, at least 3, at least 4, or at least 5 or more locked nucleosides, 2′ substituted nucleosides, 3′ substituted nucleosides, or a combination thereof. Additionally or alternatively, the central region can include one or more modified nucleosides including locked nucleosides, including but not limited to LNA, ScpBNA, AmNA, and GuNA, or one or more abasic monomers or any combination thereof. The central region can include one modified nucleotide (e.g., a 2′-substituted nucleoside such as 2′-OMe-3′xylo) at the first, second, third, or fourth gap nucleoside position (from the 5′ end of the central region). The modified nucleotide can be at the third gap nucleoside position (from the 5′ end of the central region). The modified nucleotide can be at the first gap nucleoside position (from the 5′ end of the central region). The central region can include one modified nucleotide of (8nh)G, (2s)T, (8nh)A, or (5oh)C at the second, third, fourth, fifth, sixth, seventh, eighth, or ninth nucleoside position (from the 5′ end of the central region). Other modified nucleotides include those in PCT/JP2018/006061 and US2020/0056178, which is incorporated by reference in its entirety.

[0167] The central region of an ASO can comprise at least 5 contiguous phosphorothioate-linked DNA nucleosides, at least 5 contiguous phosphodiester-linked DNA nucleosides, at least 5 contiguous mesyl phosphoramidate linked-DNA nucleosides, or a combination thereof. At least 1, 2, 3, 4, 5, 6, 7, 8, 9, 10, 11, or 12 nucleosides of the central gap region are linked by a phosphorothioate linker, a phosphodiester linker, a mesyl phosphoramidate linker, or a combination thereof. The central region can comprise 8 to 12 contiguous phosphorotioate-linked DNA nucleosides, 8 to 12 contiguous phosphodiester-linked DNA nucleosides, 8 to 12 contiguous mesyl phosphoramidate linked DNA nucleosides, or a combination thereof. At least one of the phosphorothioate linkers can be an S phosphorothioate linker. The S phosphorothioate linker can be linking the nucleosides at the second and third nucleoside positions (from the 5′ end of central region). The S phosphorothioate linked can be linking the fourth and fifth nucleoside positions (from the 5′ end of central region). At least one of the phosphorothioate linkers can be an R phosphorothioate linker. A DNA nucleoside of the central gap region is linked to a nucleoside of the 5′-wing region by a phosphorothioate linker or phosphodiester linker. A DNA nucleoside of the central gap region is linked to a nucleoside of the 3′-wing region by a phosphorothioate linker or phosphodiester linker.

[0168] The central gap region can include one or more abasic monomers. For example, the central region can include at least 1, at least 2, at least 3, at least 4, or at least 5 or more abasic monomers. Additionally or alternatively, the central region can include one or more abasic monomers, including but not abasic monomer 1, abasic monomer 2, abasic monomer 3, abasic monomer 4, or any combination thereof. The central region can include one abasic monomer at the first, second, third, fourth, fifth sixth, seventh, eighth, nineth, or tenth gap position (from the 5′ end of the central region). In some embodiments, the abasic monomer can be at the fifth gap nucleoside position (from the 5′ end of the central region). In some embodiments, the abasic monomer can be at the sixth gap nucleoside position (from the 5′ end of the central region). The central region can include one abasic monomer of abasic monomer 1, abasic monomer 2, abasic monomer 3, abasic monomer 4, or any combination thereof at the first, second, third, fourth, fifth, sixth, seventh, eighth, ninth, or tenth nucleoside position (from the 5′ end of the central region).

[0169] The central region of an ASO can comprise at least 5 contiguous phosphorothioate-linked abasic monomers, at least 5 contiguous phosphodiester-linked abasic monomers, at least 5 contiguous mesyl phosphoramidate linked-abasic monomers, or a combination thereof. At least 1, 2, 3, 4, 5, or 6 abasic monomers of the central gap region are linked by a phosphorothioate linker, a phosphodiester linker, a mesyl phosphoramidate linker, or a combination thereof. The central region can comprise 8 to 12 contiguous phosphorotioate-linked abasic monomers, 8 to 12 contiguous phosphodiester-linked abasic monomers, 8 to 12 contiguous mesyl phosphoramidate linked abasic monomers, or a combination thereof. At least one of the phosphorothioate linkers can be an S phosphorothioate linker. The S phosphorothioate linker can be linking the abasic monomers at the second and third nucleoside positions (from the 5′ end of central region). The S phosphorothioate linked can be linking the fourth and fifth abasic monomer positions (from the 5′ end of central region). At least one of the phosphorothioate linkers can be an R phosphorothioate linker. An abasic monomer of the central gap region can be linked to a nucleoside or an abasic monomer of the 5′-wing region by a phosphorothioate linker or phosphodiester linker. An abasic monomer of the central gap region can be linked to a nucleoside or an abasic monomer of the 3′-wing region by a phosphorothioate linker or phosphodiester linker.

### Antisense Oligonucleotide Sequence and Target RNA Sequence

[0170] The ASO can be complementary or hybridize to a viral target RNA sequence of HBV or in an S region or X region of HBV. The viral target can, e.g., begin at the 5′-end of the target site in acc. KC315400.1 (genotype B, “gt B”), or in any one of genotypes A, C, D, E, F, G, H or I. The skilled person would understand the HBV position, e.g., as described in Wing-Kin Sung, et al., Nature Genetics 44:765 (2012).

[0171] The ASO can be complementary or hybridize to a viral target RNA sequence that can comprise, consist of, or consist essentially of at least 5, 6, 7, 8, 9, 10, 11, or 12 contiguous nucleotides within positions 1575-1610 of SEQ ID NO: 1, positions 1575-1606 of SEQ ID NO: 1, or 1579-1606 of SEQ ID NO: 1. The ASO can be complementary or hybridize to a viral target RNA sequence that can comprise, consist of, consist essentially of 5 to 15, 5 to 14, 5 to 13, 5 to 12, 5 to 11, 5 to 10, 5 to 9, 5 to 8, 6 to 15, 6 to 14, 6 to 13, 6 to 12, 6 to 11, 6 to 10, 7 to 15, 7 to 14, 7 to 13, 7 to 12, or 7 to 11 contiguous nucleotides within positions 1575-1610 of SEQ ID NO: 1, positions 1575-1606 of SEQ ID NO: 1, or 1579-1606 of SEQ ID NO: 1. The ASO can be complementary or hybridize to a viral target RNA sequence that can comprise, consist of, or consist essentially of at least 5, 6, 7, 8, 9, 10, 11, 12, 13, 14, 15, 16, 17, 18, 19, 20, 21, 22, or 23 contiguous nucleotides within positions 1575-1610 of SEQ ID NO: 1, positions 1575-1606 of SEQ ID NO: 1, or 1579-1606 of SEQ ID NO: 1. The ASO can be perfectly complementary to the viral target RNA sequence, or there can be less than or equal to 5, 4, 3, 2, or 1 mismatches between the ASO and the viral target RNA sequence. There can be less than or equal to 2 mismatches between the ASO and the viral target RNA sequence. There can be less than or equal to 1 mismatch between the ASO and the viral target RNA sequence. The mismatch can be in the wing region of the ASO. The mismatch can be in the 5′-wing region of the ASO. The mismatch can be in the 3′-wing region of the ASO. The mismatch can be in the central gap region of the ASO.

[0172] The central region can be complementary or hybridize to a viral target RNA sequence that can comprise, consist of, or consist essentially of at least 5, 6, 7, 8, 9, 10, 11, 12, 13, 14, or 15 contiguous nucleotides within positions 1570-1610 of SEQ ID NO: 1, positions 1575-1605 of SEQ ID NO: 1, or 1580-1605 of SEQ ID NO: 1. The central region can be complementary or hybridize to a viral target RNA sequence that can comprise, consist of, or consist essentially of 5 to 15, 5 to 14, 5 to 13, 5 to 12, 5 to 11, 5 to 10, 5 to 9, 5 to 8, 6 to 15, 6 to 14, 6 to 13, 6 to 12, 6 to 11, 6 to 10, 7 to 15, 7 to 14, 7 to 13, 7 to 12, or 7 to 11 contiguous nucleotides within positions 1570-1610 of SEQ ID NO: 1, positions 1575-1605 of SEQ ID NO: 1, or 1580-1605 of SEQ ID NO: 1. The central region can be perfectly complementary to the viral target RNA sequence. Alternatively, there can be less than or equal to 5, 4, 3, 2, or 1 mismatch between the central region and the viral target RNA sequence. There can be less than or equal to 2 mismatches between the central region and the viral target RNA sequence. There can be less than or equal to 1 mismatch between the central region and the viral target RNA sequence.

[0173] The ASO can comprise a nucleotide sequence that is at least 90%, at least 91%, at least 92%, at least 93%, at least 94%, at least 95%, at least 96%, at least 97%, at least 98%, at least 99%, or 100% identical to a nucleotide sequence selected from the sequences listed in Table 1 or Table 2.

[0174] The ASOs of the disclosure can have a sequence that differs from an ASO of Table 2 by one nucleoside. The ASOs of the disclosure can have a sequence that differs from an ASO of Table 2 by two nucleosides. The ASOs of the disclosure can have a sequence that differs from the ASO of Table 2 by three nucleosides. The ASOs of the disclosure can have a sequence that differs from an ASO of Table 2 by four nucleosides. In some embodiments, nucleoside differences may comprise abasic monomers.

[0175] The ASOs of the disclosure can have a sequence of Table 2, but one T in the central region is replaced by (2s)T, one C in the central region is replaced by (5oh)C, and/or one A is replaced by (8nh)A in the central region. The ASOs of the disclosure can have a sequence of Table 2, but with one or two ScpBNA, AmNA, or GuNA in the 5′-wing portion. The ASOs of the disclosure can have a sequence of Table 2, but with one or two ScpBNA, AmNA, or GuNA in the 3′-wing portion. The ASO can comprise a nucleotide sequence that is at least 90%, at least 91%, at least 92%, at least 93%, at least 94%, at least 95%, at least 96%, at least 97%, at least 98%, at least 99%, or 100% identical to a nucleotide sequence of any one of SEQ ID NOs: 3-320, 353-404, and 446-1344.

[0176] ASOs of particular interest, due to observed activity, include but are not limited to, ASO-676 (SEQ ID NO: 697), ASO-677 (SEQ ID NO: 698), ASO-1037 (SEQ ID NO: 1058), ASO-707 (SEQ ID NO: 728), ASO-1192 (SEQ ID NO: 1213), ASO-651 (SEQ ID NO: 672), ASO-1166 (SEQ ID NO: 1187), ASO-1181 (SEQ ID NO: 1202), ASO-1179 (SEQ ID NO: 1200), and ASO-962 (SEQ ID NO: 983). In some embodiments, the ASO is selected from ASO-676 (SEQ ID NO: 697), ASO-677 (SEQ ID NO: 698), ASO-1037 (SEQ ID NO: 1058), ASO-707 (SEQ ID NO: 728), and ASO-1192 (SEQ ID NO: 1213). In some embodiments, the ASO is selected from ASO-651 (SEQ ID NO: 672), ASO-1166 (SEQ ID NO: 1187), ASO-1181 (SEQ ID NO: 1202), and ASO-1179 (SEQ ID NO: 1200). In some embodiments, the ASO is ASO-962 (SEQ ID NO: 983).

[0177] The disclosed ASO can decrease expression of a target RNA sequence (e.g., a target gene) by recruiting RNase H to cleave and degrade the RNA transcript of the target RNA sequence, lowering RNA levels and thereby lowering levels of the protein encoded by the target RNA sequence. The disclosed ASO can act to activate toll-like receptor 8 (TLR8). TLR8 is associated with production of IL-12, a proinflammatory cytokine that plays a role in stimulating cell-mediated immunity and may play a role in achieving sustained control of HBV replication.

### Conjugates

[0178] The ASOs disclosed herein can further include one or more conjugates. The conjugate may be attached to the 5′ end and/or the 3′ end of the ASO via covalent attachment, such as to a nucleotide. The conjugate can be covalently attached via a linker to the ASO. The conjugate can be attached to nucleobases, sugar moieties, or internucleoside linkages of the ASO molecules of the disclosure.

[0179] The type of conjugate or ligand used and the extent of conjugation of the ASO molecules of the disclosure can be evaluated, for example, for improved pharmacokinetic profiles, bioavailability, and/or stability of ASO molecules while at the same time maintaining the ability of the ASO to mediate functional activity. A conjugate or ligand may alter distribution, targeting, or lifetime of an ASO molecule into which it is incorporated. A conjugate or ligand may provide an enhanced affinity for a selected target (e.g., molecule, cell, or cell type), compartment (e.g., cellular or organ compartment), tissue, organ, or region of the body, as, e.g., compared to a molecule lacking such a conjugate or ligand.

[0180] A conjugate or ligand can include a naturally occurring substance or a recombinant or synthetic molecule. Non-limiting examples of conjugates and ligands include serum proteins (e.g., humans serum albumin, low-density lipoprotein, globulin), cholesterol moieties, vitamins (e.g., biotin, vitamin E, vitamin B12), folate moieties, steroids, bile acids (e.g., cholic acid), fatty acids (e.g., palmitic acid, myristic acid), sugars (e.g., mannose), carbohydrate (e.g., a dextran, pullulan, chitin, chitosan, inulin, cyclodextrin, hyaluronic acid, or N-acetyl-galactosamine [GalNAc]), glycosides, phospholipids, antibodies or binding fragments thereof (e.g., an antibody or binding fragment that targets the ASO to a specific cell type such as liver), dyes, intercalating agents (e.g., acridines), cross-linkers (e.g., psoralene, mitomycin C), porphyrins (e.g., TPPC4, texaphyrin, Sapphryin), polycyclic aromatic hydrocarbons (e.g., phenazine, dihydrophenazine), artificial endonucleases (e.g., EDTA), lipophilic molecules (e.g., cholesterol, tocopherol, long fatty acids [e.g., docosanoic, palmitoyl, docosahexanoic], cholic acid, adamantane acetic acid, 1-pyrene butyric acid, dihydrotestosterone, 1,3-BisO(hexadecyl)glycerol, geranyloxyhexyl group, hexadecylglycerol, borneol, menthol, 1,3-propanediol, heptadecyl group, 03-(oleoyl) lithocholic acid, 03-(oleoyl) cholenic acid, dimethoxytrityl, or phenoxazine), peptides (e.g., antennapedia peptide, Tat peptide, RGD peptides), alkylating agents, polymers, such as polyethylene glycol (PEG) (e.g., PEG-40K), poly amino acids, polyamines (e.g., spermine, spermidine), alkyls, substituted alkyls, radiolabeled markers, enzymes, haptens (e.g., biotin), transport/absorption facilitators (e.g., aspirin, vitamin E, folic acid), synthetic ribonucleases (e.g., imidazole, bisimidazole, histamine, imidazole clusters, acridine-imidazole conjugates, Eu3+ complexes of tetraazamacrocycles), dinitrophenyl, HRP, or AP.

[0181] The conjugate or ligan may include a carbohydrate. Carbohydrates include, but are not limited to, sugars (e.g., monosaccharides, disaccharides, trisaccharides, tetrasaccharides, and oligosaccharides containing from about 4, 5, 6, 7, 8, or 9 monosaccharide units) and polysaccharides, such as starches, glycogen, cellulose and polysaccharide gums. The carbohydrate incorporated into the ligand may be a monosaccharide selected from a mannose, pentose, hexose, or heptose and di- and tri-saccharides including such monosaccharide units.

[0182] The carbohydrate incorporated into the conjugate or ligand can be an amino sugar, such as galactosamine, glucosamine, N-acetyl-galactosamine (GalNAc), and N-acetyl-glucosamine. The conjugate or ligand can be N-acetyl-galactosamine and derivatives thereof. Non-limiting examples of GalNAc- or galactose-containing ligands that can be incorporated into the siRNAs of the disclosure are described in WO 2020/243490; WO 2020/097342; WO 2021/119325; WO 2021/173812; WO 2021/173811; WO 2021/178885; Sig. Transduct. Target Ther. 5 (101), 1-25, 2020; ACS Chem. Biol. 10 (5), 1181-1187, 2015; J. Am. Chem. Soc. 136 (49), 16958-16961, 2014; Nucleic Acids Res. 42 (13), 8796-8807, 2014; Molec. Ther. 28 (8), 1759-1771, 2020; and Nucleic Acid Ther. 28 (3), 109-118, 2018, all of which are hereby incorporated herein by reference in their entireties.

[0183] The conjugate or ligand can be attached or conjugated to the ASO molecule directly or indirectly. For example, the conjugate can be covalently attached directly to the ASO molecule, or the conjugate can be covalently attached via a linker to the ASO molecule. The conjugate can be attached to nucleobases, sugar moieties, or internucleoside linkages of the ASO molecule of the disclosure. The conjugate or ligand may be attached to the 5′ end and/or to the 3′ end of the ASO molecule. The conjugate can be covalently attached to the 5′ end of the ASO. The conjugate can be covalently attached to the 3′ end of the ASO. The conjugate can be attached to the 5′ terminal nucleotide of the ASO or to the 3′ terminal nucleotide of the ASO.

[0184] The conjugate or ligand covalently attached to the ASO molecule can be a GalNAc derivative. The GalNAc derivative can be attached to the 5′ end and/or to the 3′ end of the ASO molecule. The GalNAc can be attached to the 3′ end of the ASO molecule. The GalNAc can be attached to the 5′ end of the ASO molecule.

[0185] The conjugate or ligand can be a GalNAc derivative comprising 1, 2, 3, 4, 5, or 6 monomeric GalNAc units. The conjugate or ligand can be a GalNAc derivate having one monomeric GalNAc unit. The conjugate or ligand can be a GalNAc derivative having two monomeric GalNAc units. The conjugate or ligand can be a GalNAc derivative having three monomeric GalNAc units. The conjugate or ligand can be a GalNAc derivative having four monomeric GalNAc units. The conjugate or ligand can be a GalNAc derivative having five monomeric GalNAc units. The conjugate or ligand can be a GalNAc derivative having six monomeric GalNAc units. Various amounts of monomeric GalNAc units are attached at the 5′ end and the 3′ end of the ASO molecule. 1, 2, 3, 4, 5, or 6 monomeric GalNAc units can be attached to the 5′ end of the ASO molecule. 1, 2, 3, 4, 5, or 6 monomeric GalNAc units can be attached to the 3′ end of the ASO molecule. The same number of monomeric GalNAc units can be attached at both the 5′ end and the 3′ end of the ASO molecule. Different numbers of monomeric GalNAc units can be attached at the 5′ end and the 3′ end of the ASO molecule.

[0186] The GalNAc can be attached to the 3′ end of the ASO via 1, 2, 3, 4, or 5 or more linkers. The GalNAc can be attached to the 5′ end of the ASO via 1, 2, 3, 4, or 5 or more linkers. The one or more linkers can be independently selected from the group consisting of a phosphodiester (p or po) linker, a phosphorothioate (ps) linker, mesyl phosphoramidate (Ms) linker, phosphoramidite-containing HEG linker, triethylene glycol (TEG) linker, and/or phosphorodithioate linker. The one or more linker(s) can be independently selected from the group consisting of: p-(PS)2, (PS)2-p-TEG-p, (PS)2-p-HEG-p, and (PS)2-p-(HEG-p)2.

[0187] The GalNAc can be of Formula (VI):

[chemical structure]

wherein m is 1, 2, 3, 4, or 5; each n is independently 1 or 2; p is 0 or 1; each R is independently H or a first protecting group; each Y is independently selected from —O—P(═O)(SH)—, —O—P(═O)(O)—, —O—P(═O)(OH)—, —O—P(S)S—, and —O—; Z is H or a second protecting group; either L is a linker or L and Y in combination are a linker; and A is H, OH, a third protecting group, an activated group, or an oligonucleotide. The first protecting group can be acetyl. The second protecting group can be trimethoxytrityl (TMT). The activated group can be a phosphoramidite group. The phosphoramidite group can be a cyanoethoxy N,N-diisopropylphosphoramidite group. The linked can be a C6-NH₂ group. A can be the ASO molecule. m can be 3. R can be H, Z can be H, and n can be 1. R can be H, Z can be H, and n can be 2.

[0188] The GalNAc can be of Formula (VII):

[chemical structure]

wherein R^{z} is OH or SH; and each n is independently 1 or 2. The GalNAc targeting ligand can include 1, 2, 3, 4, 5, or 6 GalNAc units. The conjugated moiety may be a GalNAc selected from GalNAc2, GalNAc3, GalNAc4 (the GalNAc of Formula VII, wherein n=1 and R^{z}=OH), GalNAc5, and GalNAc6. The GalNAc may be GalNAc amidite,

[chemical structure]

or GalNAc4-ps-GalNAc4-ps-GalNAc4. GalNAc3, GalNAc4, GalNAc5, and GalNAc6 may be conjugated to an ASO disclosed herein during synthesis with 1, 2, or 3 moieties. Further, GalNAc moieties, such as GalNAc1 and GalNAc2, can be used to form 5′ and 3′ GalNAc using post-synthesis conjugation.

GalNAc building blocks
GalNAc-3 phosphoramidite [chemical structure]
GalNAc-4 phosphoramidite [chemical structure]
GalNAc-5 phosphoramidite [chemical structure]
GalNAc-6 phosphoramidite [chemical structure]
After Attachment to Oligos (Nomenclature) [chemical structure]
(GalNAc3-(PS)2-p) [chemical structure]
(GalNAc4-(PS)2-p) [chemical structure]
(GalNAc5-(PS)2-p) [chemical structure]
(GalNAc6-(PS)2-p)

[0189] In some embodiments, the disclosed ASOs can be conjugated to a monomeric GalNAc or a dimeric GalNAc, such as GalNAc 4, which is show below in two forms (phosphate and phosphorothioate):

[chemical structure]

### Exemplary Antisense Oligonucleotides

[0190] As described above, the ASOs disclosed herein can comprise a modified nucleotide such as locked nucleoside, 2′ substituted nucleoside, 3′ substituted nucleoside, or a combination thereof. Additionally or alternatively, the ASOs disclosed herein can comprise a modified nucleotide such as (8nh)G, (2s)T, (8nh)A, (5oh)C, or a combination thereof. Additionally or alternatively, the ASOs disclosed herein can comprise abasic monomer. Additionally or alternatively, the ASOs disclosed herein can comprise at least one phosphorothioate internucleoside linkage. Table 1 provides exemplary ASO sequences including nucleotide modifications. Table 2 provides examples of unmodified nucleotide sequences of preferred ASO sequences, shown as the unmodified deoxynucleotide sequence.

TABLE 1

| | SEQ | |
|---|---|---|
| | ID | |
| ASO ID # | NO | ASO Sequence (5′ to 3′) |
| ASO-1 | 2 | moeGpsmoe(5m)CpsmoeApsmoeGpsmoeApsGpsGpsTpsGpsApsApsGps(5m) |
| | | CpsGpsApsmoeApsmoeGpsmoeTpsmoeGpsmoe(5m)C |
| ASO-2 | 3 | moeGpsmoeTpsmoeGpsmoeApsmoeApsGps(5m)CpsGpsApsApsGpsTpsGps |
| | | (5m)CpsAps(moe5m)CpsmoeAps(moe5m)CpsmoeGpsmoeG |
| ASO-3 | 4 | moeGpsmoeGpsmoeTpsmoeGpsmoeApsApsGps(5m)CpsGpsApsApsGpsTps |
| | | Gps(5m)CpsmoeAps(moe5m)CpsmoeAps(moe5m)CpsmoeG |
| ASO-4 | 5 | moeApsmoeGpsmoeGpsmoeTpsmoeGpsApsApsGps(5m)CpsGpsApsApsGps |
| | | TpsGps(moe5m)CpsmoeAps(moe5m)CpsmoeAps(moe5m)C |
| ASO-5 | 6 | moeApsmoeGpsmoeApsmoeGpsmoeGpsTpsGpsApsApsGps(5m)CpsGpsAps |
| | | ApsGpsmoeTpsmoeGps(moe5m)CpsmoeAps(moe5m)C |
| ASO-6 | 7 | moe(5m)CpsmoeApsmoeGpsmoeApsmoeGpsGpsTpsGpsApsApsGps(5m)Cps |
| | | GpsApsApsmoeGpsmoeTpsmoeGpsmoe(5m)CpsmoeA |
| ASO-7 | 8 | moeTpsmoeGps(moe5m)CpsmoeApsmoeGpsApsGpsGpsTpsGpsApsApsGps |
| | | (5m)CpsGpsmoeApsmoeApsmoeGpsmoeTpsmoeG |
| ASO-8 | 9 | (moe5m)CpsmoeGpsmoeTpsmoeGps(moe5m)CpsApsGpsApsGpsGpsTpsGps |
| | | ApsApsGps(moe5m)CpsmoeGpsmoeApsmoeApsmoeG |
| ASO-9 | 10 | moeApsmoe(5m)CpsmoeGpsmoeTpsmoeGps(5m)CpsApsGpsApsGpsGpsTps |
| | | GpsApsApsmoeGpsmoe(5m)CpsmoeGpsmoeApsmoeA |
| ASO-10 | 11 | moeApsmoeApsmoeApsmoe(5m)CpsmoeGps(5m)Cps(5m)CpsGps(5m)Cps |
| | | ApsGpsAps(5m)CpsAps(5m)CpsmoeApsmoeTpsmoe(5m)Cpsmoe(5m) |
| | | CpsmoeA |
| ASO-11 | 12 | moeApsmoeApsmoeApsmoeApsmoe(5m)CpsGps(5m)CpsGps(5m)CpsAps |
| | | GpsAps(5m)CpsApsmoe(5m)CpsmoeApsmoeTpsmoe(5m)Cpsmoe(5m)C |
| ASO-12 | 13 | moeTpsmoeApsmoeApsmoeApsmoeAps(5m)CpsGps(5m)Cps(5m)CpsGps |
| | | (5m)CpsApsGpsAps(5m)CpsmoeApsmoe(5m)CpsmoeApsmoeTpsmoe(5m)c |
| ASO-13 | 14 | moeApsmoeTpsmoeApsmoeApsmoeApsAps(5m)CpsGps(5m)Cps(5m)Cps |
| | | Gps(5m)CpsApsGpsAps(5m)CpsmoeApsmoe(5m)CpsmoeApsmoeTpsmoe |
| | | (5m)C |
| ASO-14 | 15 | moeGpsmoeApsmoeTpsmoeApsmoeApsApsAps(5m)CpsGps(5m)Cps(5m) |
| | | CpsGps(5m)CpsApsGpsApsmoe(5m)CpsmoeApsmoe(5m)CpsmoeApsmoeT |
| ASO-15 | 16 | moeTpsmoeGpsmoeApsmoeTpsmoeApsApsApsAps(5m)CpsGps(5m)Cps |
| | | (5m)CpsGps(5m)CpsApsmoeGpsmoeApsmoe(5m)CsmoeApsmoe(5m)C |
| ASO-16 | 17 | moeApsmoeTpsmoeGpsmoeApsmoeTpsApsApsApsAps(5m)CpsGps(5m)Cps |
| | | (5m)CpsGps(5m)CpsmoeApsmoeGpsmoeApsmoe(5m)CpsmoeA |
| ASO-17 | 18 | mCpsmGpsmUpsmCpsmUpsrCrCrArCrUrUrCrGrCrUpsmUpsmCpsmApsm |
| | | CpsmG |
| ASO-18 | 19 | moeGpsmoe(5m)CpsmoeApsmoeGpsmoeApsmGpsmGpsTpsGpsApsApsGps |
| | | (5m)CpsGpsApsmoeApsmoeGpsmoeTpsmoeGpsmoe(5m)C |
| ASO-19 | 20 | moeGpsmoe(5m)CpsmoeApsmoeGpsmoeApsrGpsrGpsTpsGpsApsApsGps |
| | | (5m)CpsGpsApsmoeApsmoeGpsmoeTpsmoeGpsmoe(5m)C |
| ASO-20 | 21 | rUpsrUrGmoeGpsmoe(5m)CpsmoeApsmoeGpsmoeApsGpsGpsTpsGpsAps |
| | | ApsGps(5m)CpsGpsApsmoeApsmoeGpsmoeTpsmoeGpsmoe(5m)C |
| ASO-21 | 22 | rUrUpsrGmoeGpsmoe(5m)CpsmoeApsmoeGpsmoeApsGpsGpsTpsGpsAps |
| | | ApsGps(5m)CpsGpsApsmoeApsmoeGpsmoeTpsmoeGpsmoe(5m)C |
| ASO-22 | 23 | rUpsrUpsrGmoeGpsmoe(5m)CpsmoeApsmoeGpsmoeApsGpsGpsTpsGpsAps |
| | | ApsGps(5m)CpsGpsApsmoeApsmoeGpsmoeTpsmoeGpsmoe(5m)C |
| ASO-23 | 24 | rUpsrGpsrUmoeGpsmoe(5m)CpsmoeApsmoeGpsmoeApsGpsGpsTpsGpsAps |
| | | ApsGps(5m)CpsGpsApsmoeApsmoeGpsmoeTpsmoeGpsmoe(5m)C |
| ASO-24 | 25 | ocpGpsmoe(5m)CpsmoeApsmoeGpsmoeApsGpsGpsTpsGpsApsApsGps(5m) |
| | | CpsGpsApsmoeApsmoeGpsmoeTpsmoeGpsmoe(5m)C |
| ASO-25 | 26 | moeGpsocpCpsmoeApsmoeGpsmoeApsGpsGpsTpsGpsApsApsGps(5m)Cps |
| | | GpsApsmoeApsmoeGpsmoeTpsmoeGpsmoe(5m)C |
| ASO-26 | 27 | moeGpsmoe(5m)CpsocpApsmoeGpsmoeApsGpsGpsTpsGpsApsApsGps(5m) |
| | | CpsGpsApsmoeApsmoeGpsmoeTpsmoeGpsmoe(5m)C |
| ASO-27 | 28 | moeGpsmoe(5m)CpsmoeApsocpGpsmoeApsGpsGpsTpsGpsApsApsGps(5m) |
| | | CpsGpsApsmoeApsmoeGpsmoeTpsmoeGpsmoe(5m)C |
| ASO-28 | 29 | moeGpsmoe(5m)CpsmoeApsmoeGpsocpApsGpsGpsTpsGpsApsApsGps(5m) |
| | | CpsGpsApsmoeApsmoeGpsmoeTpsmoeGpsmoe(5m)C |
| ASO-29 | 30 | moeGpsmoe(5m)CpsmoeApsmoeGpsmoeApsGpsGpsTpsGpsApsApsGps(5m) |
| | | CpsGpsApsocpApsmoeGpsmoeTpsmoeGpsmoe(5m)C |
| ASO-30 | 31 | moeGpsmoe(5m)CpsmoeApsmoeGpsmoeApsGpsGpsTpsGpsApsApsGps(5m) |
| | | CpsGpsApsmoeApsocpGpsmoeTpsmoeGpsmoe(5m)C |
| ASO-31 | 32 | moeGpsmoe(5m)CpsmoeApsmoeGpsmoeApsGpsGpsTpsGpsApsApsGps(5m) |
| | | CpsGpsApsmoeApsmoeGpsocpUpsmoeGpsmoe(5m)C |
| ASO-32 | 33 | moeGpsmoe(5m)CpsmoeApsmoeGpsmoeApsGpsGpsTpsGpsApsApsGps(5m) |
| | | CpsGpsApsmoeApsmoeGpsmoeTpsocpGpsmoe(5m)C |
| ASO-33 | 34 | moeGpsmoe(5m)CpsmoeApsmoeGpsmoeApsGpsGpsTpsGpsApsApsGps(5m) |
| | | CpsGpsApsmoeApsmoeGpsmoeTpsmoeGpsocpC |
| ASO-34 | 35 | moeGpsmoe(5m)CpsmoeApsmoeGpsmoeApsGpsGpsTpsGpsApsApsGps(5m) |
| | | CpsGpsApsmoeApsmoeGpsmoeUpsmoeGpsmoe(5m)C |
| ASO-35 | 36 | rUmoeGpsmoe(5m)CpsmoeApsmoeGpsmoeApsGpsGpsTpsGpsApsApsGps |
| | | (5m)CpsGpsApsmoeApsmoeGpsmoeTpsmoeGpsmoe(5m)C |
| ASO-36 | 37 | rUpsrUmoeGpsmoe(5m)CpsmoeApsmoeGpsmoeApsGpsGpsTpsGpsApsAps |
| | | Gps(5m)CpsGpsApsmoeApsmoeGpsmoeTpsmoeGpsmoe(5m)C |
| ASO-37 | 38 | rUpsrUpsrUmoeGpsmoe(5m)CpsmoeApsmoeGpsmoeApsGpsGpsTpsGpsAps |
| | | ApsGps(5m)CpsGpsApsmoeApsmoeGpsmoeTpsmoeGpsmoe(5m)C |
| ASO-38 | 39 | rUpsrGmoeGpsmoe(5m)CpsmoeApsmoeGpsmoeApsGpsGpsTpsGpsApsAps |
| | | Gps(5m)CpsGpsApsmoeApsmoeGpsmoeTpsmoeGpsmoe(5m)C |
| ASO-38 | 40 | rUrUrGmoeGpsmoe(5m)CpsmoeApsmoeGpsmoeApsGpsGpsTpsGpsApsAps |
| | | Gps(5m)CpsGpsApsmoeApsmoeGpsmoeTpsmoeGpsmoe(5m)C |
| ASO-40 | 41 | rUrUrGrUmoeGpsmoe(5m)CpsmoeApsmoeGpsmoeApsGpsGpsTpsGpsAps |
| | | ApsGps(5m)CpsGpsApsmoeApsmoeGpsmoeTpsmoeGpsmoe(5m)C |
| ASO-41 | 42 | lmGpsmoe(5m)CpsmoeApsmoeGpsmoeApsGpsGpsTpsGpsApsApsGps(5m) |
| | | CpsGpsApsmoeApsmoeGpsmoeTpsmoeGpsmoe(5m)C |
| ASO-42 | 43 | moeGpsmoe(5m)CpsmoeApslmGpsmoeApsGpsGpsTpsGpsApsApsGps(5m) |
| | | CpsGpsApsmoeApsmoeGpsmoeTpsmoeGpsmoe(5m)C |
| ASO-43 | 44 | moeGpsmoe(5m)CpsmoeApsmoeGpsmoeApsGpsGpsTpsGpsApsApsGps(5m) |
| | | CpsGpsApsmoeApslmGpsmoeTpsmoeGpsmoe(5m)C |
| ASO-44 | 45 | moeGpsmoe(5m)CpsmoeApsmoeGpsmoeApsGpsGpsTpsGpsApsApsGps(5m) |
| | | CpsGpsApsmoeApsmoeGpsmoeTpslmGpsmoe(5m)C |
| ASO-45 | 46 | rUrGrUrUrGrUmoeGpsmoe(5m)CpsmoeApsmoeGpsmoeApsGpsGpsTpsGps |
| | | ApsApsGps(5m)CpsGpsApsmoeApsmoeGpsmoeTpsmoeGpsmoe(5m)C |
| ASO-46 | 47 | rUrUrArUmoeGpsmoe(5m)CpsmoeApsmoeGpsmoeApsGpsGpsTpsGpsAps |
| | | ApsGps(5m)CpsGpsApsmoeApsmoeGpsmoeTpsmoeGpsmoe(5m)C |
| ASO-47 | 48 | rUrArUrUrArUmoeGpsmoe(5m)CpsmoeApsmoeGpsmoeApsGpsGpsTpsGps |
| | | ApsApsGps(5m)CpsGpsApsmoeApsmoeGpsmoeTpsmoeGpsmoe(5m)C |
| ASO-48 | 49 | moeGpsmoe(5m)CpsmoeApsmoeGpsmoeApsocpGpsGpsTpsGpsApsApsGps |
| | | (5m)CpsGpsApsmoeApsmoeGpsmoeTpsmoeGpsmoe(5m)C |
| ASO-49 | 50 | moeGpsmoe(5m)CpsmoeApsmoeGpsmoeApsGpsocpGpsTpsGpsApsApsGps |
| | | (5m)CpsGpsApsmoeApsmoeGpsmoeTpsmoeGpsmoe(5m)C |
| ASO-50 | 51 | moeGpsmoe(5m)CpsmoeApsmoeGpsmoeApsGpsGpsocpUpsGpsApsApsGps |
| | | (5m)CpsGpsApsmoeApsmoeGpsmoeTpsmoeGpsmoe(5m)C |
| ASO-51 | 52 | moeGpsmoe(5m)CpsmoeApsmoeGpsmoeApsomcpGpsGpsTpsGpsApsAps |
| | | Gps(5m)CpsGpsApsmoeApsmoeGpsmoeTpsmoeGpsmoe(5m)C |
| ASO-52 | 53 | moeGpsmoe(5m)CpsmoeApsmoeGpsmoeApsGpsomcpGpsTpsGpsApsAps |
| | | Gps(5m)CpsGpsApsmoeApsmoeGpsmoeTpsmoeGpsmoe(5m)C |
| ASO-53 | 54 | moeGpsmoe(5m)CpsmoeApsmoeGpsmoeApsGpsGpsomcpUpsGpsApsAps |
| | | Gps(5m)CpsGpsApsmoeApsmoeGpsmoeTpsmoeGpsmoe(5m)C |
| ASO-54 | 55 | moeGpsmoe(5m)CpsmoeApsmoeGpsmoeApsGpslmGpsTpsGpsApsApsGps |
| | | (5m)CpsGpsApsmoeApsmoeGpsmoeTpsmoeGpsmoe(5m)C |
| ASO-55 | 56 | moeGpsmoe(5m)CpsmoeApsmoeGpsmoeApslmGpsGpsTpsGpsApsApsGps |
| | | (5m)CpsGpsApsmoeApsmoeGpsmoeTpsmoeGpsmoe(5m)C |
| ASO-56 | 57 | moeGpsmoe(5m)CpsmoeApsmoeGpsmoeApsGpsGpslmUpsGpsApsApsGps |
| | | (5m)CpsGpsApsmoeApsmoeGpsmoeTpsmoeGpsmoe(5m)C |
| ASO-57 | 58 | moeGpsmoe(5m)CpsmoeApsmoeGpsmoeApsGpsGpsTpsGpsApsApsGps |
| | | (5m)CpsGpsApsmoeApsmoeGpsmoeTpsmoeGpsmoe(5m)CrU |
| ASO-58 | 59 | moeGpsmoe(5m)CpsmoeApsmoeGpsmoeApsGpsGpsTpsGpsApsApsGps |
| | | (5m)CpsGpsApsmoeApsmoeGpsmoeTpsmoeGpsmoe(5m)CrUpsrU |
| ASO-59 | 60 | moeGpsmoe(5m)CpsmoeApsmoeGpsmoeApsGpsGpsTpsGpsApsApsGps(5m) |
| | | CpsGpsApsmoeApsmoeGpsmoeTpsmoeGpsmoe(5m)CrUpsrUpsrU |
| ASO-60 | 61 | moeGpsmoe(5m)CpsmoeApsmoeGpsmoeApsGpsGpsTpsGpsApsApsGps(5m) |
| | | CpsGpsApsmoeApsmoeGpsmoeTpsmoeGpsmoe(5m)CrUpsrG |
| ASO-61 | 62 | moeGpsmoe(5m)CpsmoeApsmoeGpsmoeApsGpsGpsTpsGpsApsApsGps(5m) |
| | | CpsGpsApsmoeApsmoeGpsmoeTpsmoeGpsmoe(5m)CpsrUpsrG |
| ASO-62 | 63 | moeGpsmoe(5m)CpsmoeApsmoeGpsmoeApsGpsGpsTpsGpsApsApsGps(5m) |
| | | CpsGpsApsmoeApsmoeGpsmoeTpsmoeGpsmoe(5m)CrUrUrG |
| ASO-63 | 64 | moeGpsmoe(5m)CpsmoeApsmoeGpsmoeApsGpsGpsTpsGpsApsApsGps(5m) |
| | | CpsGpsApsmoeApsmoeGpsmoeTpsmoeGpsmoe(5m)CrUpsrUrG |
| ASO-64 | 65 | moeGpsmoe(5m)CpsmoeApsmoeGpsmoeApsGpsGpsTpsGpsApsApsGps(5m) |
| | | CpsGpsApsmoeApsmoeGpsmoeTpsmoeGpsmoe(5m)CrUpsrUpsrG |
| ASO-65 | 66 | moeGpsmoe(5m)CpsmoeApsmoeGpsmoeApsGpsGpsTpsGpsApsApsGps(5m) |
| | | CpsGpsApsmoeApsmoeGpsmoeTpsmoeGpsmoe(5m)CrUpsrGpsrU |
| ASO-66 | 67 | moeGpsmoe(5m)CpsmoeApsmoeGpsmoeApsGpsGpsTpsGpsApsApsGps(5m) |
| | | CpsGpsApsmoeApsmoeGpsrUpsmoeGpsmoe(5m)C |
| ASO-67 | 68 | omcpGpsmoe(5m)CpsmoeApsmoeGpsmoeApsGpsGpsTpsGpsApsApsGps |
| | | (5m)CpsGpsApsmoeApsmoeGpsmoeTpsmoeGpsmoe(5m)C |
| ASO-68 | 69 | moeGpsomcpCpsmoeApsmoeGpsmoeApsGpsGpsTpsGpsApsApsGps(5m) |
| | | CpsGpsApsmoeApsmoeGpsmoeTpsmoeGpsmoe(5m)C |
| ASO-69 | 70 | moeGpsmoe(5m)CpsomcpApsmoeGpsmoeApsGpsGpsTpsGpsApsApsGps |
| | | (5m)CpsGpsApsmoeApsmoeGpsmoeTpsmoeGpsmoe(5m)C |
| ASO-70 | 71 | moeGpsmoe(5m)CpsmoeApsomcpGpsmoeApsGpsGpsTpsGpsApsApsGps |
| | | (5m)CpsGpsApsmoeApsmoeGpsmoeTpsmoeGpsmoe(5m)C |
| ASO-71 | 72 | moeGpsmoe(5m)CpsmoeApsmoeGpsomcpApsGpsGpsTpsGpsApsApsGps |
| | | (5m)CpsGpsApsmoeApsmoeGpsmoeTpsmoeGpsmoe(5m)C |
| ASO-72 | 73 | moeGpsmoe(5m)CpsmoeApsmoeGpsmoeApsGpsGpsTpsGpsApsApsGps |
| | | (5m)CpsGpsApsomcpApsmoeGpsmoeTpsmoeGpsmoe(5m)C |
| ASO-73 | 74 | moeGpsmoe(5m)CpsmoeApsmoeGpsmoeApsGpsGpsTpsGpsApsApsGps |
| | | (5m)CpsGpsApsmoeApsomcpGpsmoeTpsmoeGpsmoe(5m)C |
| ASO-74 | 75 | moeGpsmoe(5m)CpsmoeApsmoeGpsmoeApsGpsGpsTpsGpsApsApsGps |
| | | (5m)CpsGpsApsmoeApsmoeGpsomcpUpsmoeGpsmoe(5m)C |
| ASO-75 | 76 | moeGpsmoe(5m)CpsmoeApsmoeGpsmoeApsGpsGpsTpsGpsApsApsGps |
| | | (5m)CpsGpsApsmoeApsmoeGpsmoeTpsomcpGpsmoe(5m)C |
| ASO-76 | 77 | moeGpsmoe(5m)CpsmoeApsmoeGpsmoeApsGpsGpsTpsGpsApsApsGps |
| | | (5m)CpsGpsApsmoeApsmoeGpsmoeTpsmoeGpsomcpC |
| ASO-77 | 78 | mGpsmoe(5m)CpsmoeApsmoeGpsmoeApsGpsGpsTpsGpsApsApsGps(5m) |
| | | CpsGpsApsmoeApsmoeGpsmoeTpsmoeGpsmoe(5m)C |
| ASO-78 | 79 | moeGpsm(5m)CpsmoeApsmoeGpsmoeApsGpsGpsTpsGpsApsApsGps(5m) |
| | | CpsGpsApsmoeApsmoeGpsmoeTpsmoeGpsmoe(5m)C |
| ASO-79 | 80 | moeGpsmoe(5m)CpsmApsmoeGpsmoeApsGpsGpsTpsGpsApsApsGps(5m) |
| | | CpsGpsApsmoeApsmoeGpsmoeTpsmoeGpsmoe(5m)C |
| ASO-80 | 81 | moeGpsmoe(5m)CpsmoeApsmGpsmoeApsGpsGpsTpsGpsApsApsGps(5m) |
| | | CpsGpsApsmoeApsmoeGpsmoeTpsmoeGpsmoe(5m)C |
| ASO-81 | 82 | moeGpsmoe(5m)CpsmoeApsmoeGpsmApsGpsGpsTpsGpsApsApsGps(5m) |
| | | CpsGpsApsmoeApsmoeGpsmoeTpsmoeGpsmoe(5m)C |
| ASO-82 | 83 | moeGpsmoe(5m)CpsmoeApsmoeGpsmoeApsGpsGpsTpsGpsApsApsGps |
| | | (5m)CpsGpsApsmApsmoeGpsmoeTpsmoeGpsmoe(5m)C |
| ASO-83 | 84 | moeGpsmoe(5m)CpsmoeApsmoeGpsmoeApsGpsGpsTpsGpsApsApsGps |
| | | (5m)CpsGpsApsmoeApsmGpsmoeTpsmoeGpsmoe(5m)C |
| ASO-84 | 85 | moeGpsmoe(5m)CpsmoeApsmoeGpsmoeApsGpsGpsTpsGpsApsApsGps |
| | | (5m)CpsGpsApsmoeApsmoeGpsmUpsmoeGpsmoe(5m)C |
| ASO-85 | 86 | moeGpsmoe(5m)CpsmoeApsmoeGpsmoeApsGpsGpsTpsGpsApsApsGps |
| | | (5m)CpsGpsApsmoeApsmoeGpsmoeTpsmGpsmoe(5m)C |
| ASO-86 | 87 | moeGpsmoe(5m)CpsmoeApsmoeGpsmoeApsGpsGpsTpsGpsApsApsGps |
| | | (5m)CpsGpsApsmoeApsmoeGpsmoeTpsmoeGpsm(5m)C |
| ASO-87 | 88 | moeGpsmoe(5m)CpsmoeDAPpsmoeGpsmoeApsGpsGpsTpsGpsApsApsGps |
| | | (5m)CpsGpsApsmoeApsmoeGpsmoeTpsmoeGpsmoe(5m)C |
| ASO-88 | 89 | moeGpsmoe(5m)CpsmoeApsmoeGpsmoeDAPpsGpsGpsTpsGpsApsApsGps |
| | | (5m)CpsGpsApsmoeApsmoeGpsmoeTpsmoeGpsmoe(5m)C |
| ASO-89 | 90 | moeGpsmoe(5m)CpsmoeApsmoeGpsmoeApsGpsGpsTpsGpsApsApsGps(5m) |
| | | CpsGpsApsmoeDAPpsmoeGpsmoeTpsmoeGpsmoe(5m)C |
| ASO-90 | 91 | mGpsmoe(5m)CpsmoeApsmGpsmoeApsGpsGpsTpsGpsApsApsGps(5m)Cps |
| | | GpsApsmoeApsmoeGpsmoeTpsmoeGpsmoe(5m)C |
| ASO-91 | 92 | moeGpsmoe(5m)CpsmApsmoeGpsmApsGpsGpsTpsGpsApsApsGps(5m)Cps |
| | | GpsApsmoeApsmoeGpsmoeTpsmoeGpsmoe(5m)C |
| ASO-92 | 93 | moeGpsmoe(5m)CpsmoeApsmoeGpsmoeApsGpsGpsTpsGpsApsApsGps(5m) |
| | | CpsGpsApsmoeApsmGpsmoeTpsmGpsmoe(5m)C |
| ASO-93 | 94 | mGpsmoe(5m)CpsmApsmoeGpsmApsGpsGpsTpsGpsApsApsGps(5m)Cps |
| | | GpsApsmoeApsmoeGpsmoeTpsmoeGpsmoe(5m)C |
| ASO-94 | 95 | moeGpsmoe(5m)CpsmoeApsmoeGpsmoeApsGpsGpsTpsGpsApsApsGps(5m) |
| | | CpsGpsApsmApsmGpsmoeTpsmGpsmoe(5m)C |
| ASO-95 | 96 | mGpsmoe(5m)CpsmoeApsmoeGpsmoeApsGpsGpsTpsGpsApsApsGps(5m) |
| | | CpsGpsApsmoeApsmoeGpsmoeTpsmoeGpsm(5m)C |
| ASO-96 | 97 | moeGpsmoe(5m)CpsmoeApsmoeGpsmoeApsGpsGpsTpsGpsApss?ApsGps |
| | | (5m)CpsGpsApsmoeApsmoeGpsmoeTpsmoeGpsmoe(5m)C |
| ASO-97 | 98 | moeGpsmoe(5m)CpsmoeApsmoeGpsmoeApsGpsGpsTpsGpsApsApss?Gps |
| | | (5m)CpsGpsApsmoeApsmoeGpsmoeTpsmoeGpsmoe(5m)C |
| ASO-98 | 99 | moeGpsmoe(5m)CpsmoeApsmoeGpsmoeApsGpsGpsTpsGpsApsApsGps(5m) |
| | | CpsGpsApss?moeApsmoeGpsmoeTpsmoeGpsmoe(5m)C |
| ASO-99 | 100 | moeGpsmoe(5m)CpsmoeApsmoeGpsmoeAps(8nh)GpsGpsTpsGpsApsAps |
| | | Gps(5m)CpsGpsApsmoeApsmoeGpsmoeTpsmoeGpsmoe(5m)C |
| ASO-100 | 101 | moeGpsmoe(5m)CpsmoeApsmoeGpsmoeApsGps(8nh)GpsTpsGpsApsAps |
| | | Gps(5m)CpsGpsApsmoeApsmoeGpsmoeTpsmoeGpsmoe(5m)C |
| ASO-101 | 102 | moeGpsmoe(5m)CpsmoeApsmoeGpsmoeApsGpsGps(2s)TpsGpsApsApsGps |
| | | (5m)CpsGpsApsmoeApsmoeGpsmoeTpsmoeGpsmoe(5m)C |
| ASO-102 | 103 | moeGpsmoe(5m)CpsmoeApsmoeGpsmoeApsGpss?GpsTpsGpsApsApsGps |
| | | (5m)CpsGpsApsmoeApsmoeGpsmoeTpsmoeGpsmoe(5m)C |
| ASO-103 | 104 | moeGpsmoe(5m)CpsmoeApsmoeGpsmoeApsGpsGpss?TpsGpsApsApsGps |
| | | (5m)CpsGpsApsmoeApsmoeGpsmoeTpsmoeGpsmoe(5m)C |
| ASO-104 | 105 | moeGpsmoe(5m)CpsmoeApsmoeGpsmoeApsGpsGpsTpss?GpsApsApsGps |
| | | (5m)CpsGpsApsmoeApsmoeGpsmoeTpsmoeGpsmoe(5m)C |
| ASO-105 | 106 | moeGpsmoe(5m)CpsmoeApsmoeGpsmoeApsGpsGpsTpsGpss?ApsApsGps |
| | | (5m)CpsGpsApsmoeApsmoeGpsmoeTpsmoeGpsmoe(5m)C |
| ASO-106 | 107 | moeGpsmoe(5m)CpsmoeApsmoeGpsmoeApsGpsGpsTpsGpsApsApsGpss? |
| | | (5m)CpsGpsApsmoeApsmoeGpsmoeTpsmoeGpsmoe(5m)C |
| ASO-107 | 108 | moeGpsmoe(5m)CpsmoeApsmoeGpsmoeApsGpsGpsTpsGpsApsApsGps(5m) |
| | | Cpss?GpsApsmoeApsmoeGpsmoeTpsmoeGpsmoe(5m)C |
| ASO-108 | 109 | moeGpsmoe(5m)CpsmoeApsmoeGpsmoeApsGpsGpsTpsGpsApsApsGps(5m) |
| | | CpsGpss?ApsmoeApsmoeGpsmoeTpsmoeGpsmoe(5m)C |
| ASO-109 | 110 | moe(5m)CpsmoeApsmoeGpsmoeApsmoeGps(8nh)GpsTpsGpsApsApsGps |
| | | (5m)CpsGpsApsApsmoeGpsmoeTpsmoeGpsmoe(5m)CpsmoeA |
| ASO-110 | 111 | moe(5m)CpsmoeApsmoeGpsmoeApsmoeGpsGps(2s)TpsGpsApsApsGps(5m) |
| | | CpsGpsApsApsmoeGpsmoeTpsmoeGpsmoe(5m)CpsmoeA |
| ASO-111 | 112 | moe(5m)CpsmoeApsmoeGpsmoeApsmoeGpsGpsTps(8nh)GpsApsApsGps |
| | | (5m)CpsGpsApsApsmoeGpsmoeTpsmoeGpsmoe(5m)CpsmoeA |
| ASO-112 | 113 | moe(5m)CpsmoeApsmoeGpsmoeApsmoeGpsGpsTpsGps(8nh)ApsApsGps |
| | | (5m)CpsGpsApsApsmoeGpsmoeTpsmoeGpsmoe(5m)CpsmoeA |
| ASO-113 | 114 | moe(5m)CpsmoeApsmoeGpsmoeApsmoeGpsGpsTpsGpsAps(8nh)ApsGps |
| | | (5m)CpsGpsApsApsmoeGpsmoeTpsmoeGpsmoe(5m)CpsmoeA |
| ASO-114 | 115 | moe(5m)CpsmoeApsmoeGpsmoeApsmoeGpsGpsTpsGpsApsAps(8nh)Gps |
| | | (5m)CpsGpsApsApsmoeGpsmoeTpsmoeGpsmoe(5m)CpsmoeA |
| ASO-115 | 116 | moe(5m)CpsmoeApsmoeGpsmoeApsmoeGpsGpsTpsGpsApsApsGps(5oh) |
| | | CpsGpsApsApsmoeGpsmoeTpsmoeGpsmoe(5m)CpsmoeA |
| ASO-116 | 117 | moe(5m)CpsmoeApsmoeGpsmoeApsmoeGpsGpsTpsGpsApsApsGps(5m) |
| | | Cps(8nh)GpsApsApsmoeGpsmoeTpsmoeGpsmoe(5m)CpsmoeA |
| ASO-117 | 118 | moe(5m)CpsmoeApsmoeGpsmoeApsmoeGpsGpsTpsGpsApsApsGps(5m) |
| | | CpsGps(8nh)ApsApsmoeGpsmoeTpsmoeGpsmoe(5m)CpsmoeA |
| ASO-118 | 119 | moe(5m)CpsmoeApsmoeGpsmoeApsmoeGpsGpsTpsGpsApsApsGps(5m) |
| | | CpsGpsAps(8nh)ApsmoeGpsmoeTpsmoeGpsmoe(5m)CpsmoeA |
| ASO-119 | 120 | moe(5m)CpsmoeApsmoeGpsmoeApsGpsGpsTpsGpsApsApsGps(5m)Cps |
| | | GpsApsmoeApsmoeGpsmoeTpsmoeGpsmoe(5m)C |
| ASO-120 | 121 | moeGpsmoe(5m)CpsmoeApsmoeGpsmoeApsGpsGpsTpsGpsApsApsGps(5m) |
| | | CpsGpsApsmoeApsmoeGpsmoeTpsmoeG |
| ASO-121 | 122 | rGpsmoe(5m)CpsmoeApsmoeGpsmoeApsGpsGpsTpsGpsApsApsGps(5m) |
| | | CpsGpsApsmoeApsmoeGpsmoeTpsmoeGpsmoe(5m)C |
| ASO-122 | 123 | moeGpsmoe(5m)CpsmoeApsrGpsmoeApsGpsGpsTpsGpsApsApsGps(5m) |
| | | CpsGpsApsmoeApsmoeGpsmoeTpsmoeGpsmoe(5m)C |
| ASO-123 | 124 | moeGpsmoe(5m)CpsmoeApsmoeGpsrApsGpsGpsTpsGpsApsApsGps(5m) |
| | | CpsGpsApsmoeApsmoeGpsmoeTpsmoeGpsmoe(5m)C |
| ASO-124 | 125 | moeGpsmoe(5m)CpsmoeApsmoeGpsmoeApsGpsGpsTpsGpsApsApsGps(5m) |
| | | CpsGpsApsmoeApsrGpsmoeTpsmoeGpsmoe(5m)C |
| ASO-125 | 126 | moeGpsmoe(5m)CpsmoeApsmoeGpsmoeApsGpsGpsTpsGpsApsApsGps(5m) |
| | | CpsGpsApsmoeApsmoeGpsmoeTpsrGpsmoe(5m)C |
| ASO-126 | 127 | moeGpsmoe(5m)CpsmoeApsmoeGpsmoeApsGpsGpsTpsGpsApsApsGps(5m) |
| | | CpsGpsApsrApsmoeGpsmoeTpsmoeGpsmoe(5m)C |
| ASO-127 | 128 | moeGpsmoe(5m)CpsrApsmoeGpsmoeApsGpsGpsTpsGpsApsApsGps(5m) |
| | | CpsGpsApsmoeApsmoeGpsmoeTpsmoeGpsmoe(5m)C |
| ASO-128 | 129 | moeApsmoe(5m)CpsmoeGpsmoeTpsmoeGps(5oh)CpsApsGpsApsGpsGps |
| | | TpsGpsApsApsmoeGpsmoe(5m)CpsmoeGpsmoeApsmoeA |
| ASO-129 | 130 | moeApsmoe(5m)CpsmoeGpsmoeTpsmoeGps(5m)Cps(8nh)ApsGpsApsGps |
| | | GpsTpsGpsApsApsmoeGpsmoe(5m)CpsmoeGpsmoeApsmoeA |
| ASO-130 | 131 | moeApsmoe(5m)CpsmoeGpsmoeTpsmoeGps(5m)CpsAps(8nh)GpsApsGps |
| | | GpsTpsGpsApsApsmoeGpsmoe(5m)CpsmoeGpsmoeApsmoeA |
| ASO-131 | 132 | moeApsmoe(5m)CpsmoeGpsmoeTpsmoeGps(5m)CpsApsGps(8nh)ApsGps |
| | | GpsTpsGpsApsApsmoeGpsmoe(5m)CpsmoeGpsmoeApsmoeA |
| ASO-132 | 133 | moeApsmoe(5m)CpsmoeGpsmoeTpsmoeGps(5m)CpsApsGpsAps(8nh)Gps |
| | | GpsTpsGpsApsApsmoeGpsmoe(5m)CpsmoeGpsmoeApsmoeA |
| ASO-133 | 134 | moeApsmoe(5m)CpsmoeGpsmoeTpsmoeGps(5m)CpsApsGpsApsGps(8nh) |
| | | GpsTpsGpsApsApsmoeGpsmoe(5m)CpsmoeGpsmoeApsmoeA |
| ASO-134 | 135 | moeApsmoe(5m)CpsmoeGpsmoeTpsmoeGps(5m)CpsApsGpsApsGpsGps |
| | | (2s)TpsGpsApsApsmoeGpsmoe(5m)CpsmoeGpsmoeApsmoeA |
| ASO-135 | 136 | moeApsmoe(5m)CpsmoeGpsmoeTpsmoeGps(5m)CpsApsGpsApsGpsGps |
| | | Tps(8nh)GpsApsApsmoeGpsmoe(5m)CpsmoeGpsmoeApsmoeA |
| ASO-136 | 137 | moeApsmoe(5m)CpsmoeGpsmoeTpsmoeGps(5m)CpsApsGpsApsGpsGpsTps |
| | | Gps(8nh)ApsApsmoeGpsmoe(5m)CpsmoeGpsmoeApsmoeA |
| ASO-137 | 138 | moeApsmoe(5m)CpsmoeGpsmoeTpsmoeGps(5m)CpsApsGpsApsGpsGpsTps |
| | | GpsAps(8nh)ApsmoeGpsmoe(5m)CpsmoeGpsmoeApsmoeA |
| ASO-138 | 139 | moeGpsmoe(5m)CpsmoeApsmoeGpsmoeApsGpsGpsTpsGpsApsApsGps |
| | | (5m)CpsGpsApsmoeApsmoeGpsrUpsrGpsmoe(5m)C |
| ASO-139 | 140 | moeGpsmoe(5m)CpsmoeApsmoeGpsApsGpsGpsTpsGpsmoeApsApsGps |
| | | (5m)CpsGpsApsmoeApsInGpsmoeTpslnGpsln(5m)C |
| ASO-140 | 141 | moe(5m)CpsmoeApsmoeGpsmApsmoeGpsGpsTpsGpsApsApsGps(5m)Cps |
| | | GpsApsApsmoeGpsmoeTpsmoeGpsmoe(5m)CpsmoeA |
| ASO-141 | 142 | moe(5m)CpsmoeApsmoeGpsmoeApsmoeGpsmGpsTpsGpsApsApsGps(5m) |
| | | CpsGpsApsApsmoeGpsmoeTpsmoeGpsmoe(5m)CpsmoeA |
| ASO-142 | 143 | moe(5m)CpsmoeApsmoeGpsmApsmGpsGpsTpsGpsApsApsGps(5m)CpsGps |
| | | ApsApsmoeGpsmoeTpsmoeGpsmoe(5m)CpsmoeA |
| ASO-143 | 144 | moe(5m)CpsmoeApsmoeGpsmoeApsmoeGpsGpsTpsGpsApsApsGps(5m)Cps |
| | | GpsApsApsmoeGpsmoeTpsmoeGpsmoe(5m)CpsmoeA |
| ASO-144 | 145 | moe(5m)CpsmoeApsmGpsmoeApsmGpsGpsTpsGpsApsApsGps(5m)CpsGps |
| | | ApsApsmoeGpsmoeTpsmoeGpsmoe(5m)CpsmoeA |
| ASO-145 | 146 | moe(5m)CpsmoeApsmoeGpsmoeApsmoeGpsGpsTpsGpsApsApsGps(5m)Cps |
| | | GpsApsApsmGpsmoeTpsmGpsmoe(5m)CpsmoeA |
| ASO-146 | 147 | moe(5m)CpsmoeApsmGpsmoeApsmGpsGpsTpsGpsApsApsGps(5m)CpsGps |
| | | ApsApsmGpsmoeTpsmoeGpsmoe(5m)CpsmoeA |
| ASO-147 | 148 | moe(5m)CpsmoeApsmGpsmoeApsmGpsGpsTpsGpsApsApsGps(5m)CpsGps |
| | | ApsApsmoeGpsmoeTpsmGpsmoe(5m)CpsmoeA |
| ASO-148 | 149 | moe(5m)CpsmoeApsmGpsmoeApsmoeGpsGpsTpsGpsApsApsGps(5m)Cps |
| | | GpsApsApsmGpsmoeTpsmGpsmoe(5m)CpsmoeA |
| ASO-149 | 150 | moe(5m)CpsmoeApsmoeGpsmoeApsmGpsGpsTpsGpsApsApsGps(5m)Cps |
| | | GpsApsApsmGpsmoeTpsmGpsmoe(5m)CpsmoeA |
| ASO-150 | 151 | moe(5m)CpsmoeApsmGpsmoeApsmGpsGpsTpsGpsApsApsGps(5m)CpsGps |
| | | ApsApsmGpsmoeTpsmGpsmoe(5m)CpsmoeA |
| ASO-151 | 152 | moe(5m)CpsmoeApsmoeGpsmoeApsmoeGpsGpsTpsGpsApsApsGps(5m)Cps |
| | | GpsApsApsmoeGpsmoeTpsmGpsm(5m)CpsmoeA |
| ASO-152 | 153 | moe(5m)CpsmoeApsmoeGpsmoeApsmoeGpsGpsTpsGpsApsApsGps(5m)Cps |
| | | GpsApsApsmoeGpsmoeTpsmGpsm(5m)CpsmA |
| ASO-153 | 154 | moe(5m)CpsmoeApsmoeGpsmoeApsmoeGpsGpsTpsGpsApsApsGps(5m)Cps |
| | | GpsApsApsmGpsmoeTpsmGpsmoe(5m)CpsmA |
| ASO-154 | 155 | moeCpsmoeApsmoeGpsmoeApsmoeGpsGpss?TpsGpsApsApsGpsCpsGps |
| | | ApsApsmoeGpsmoeTpsmoeGpsmoeCpsmoeA |
| ASO-155 | 156 | moeCpsmoeApsmoeGpsmoeApsmoeGpsGpsTpss?GpsApsApsGpsCpsGps |
| | | ApsApsmoeGpsmoeTpsmoeGpsmoeCpsmoeA |
| ASO-156 | 157 | moeCpsmoeApsmoeGpsmoeApsmoeGpsGpsTpsGpss?ApsApsGpsCpsGps |
| | | ApsApsmoeGpsmoeTpsmoeGpsmoeCpsmoeA |
| ASO-157 | 158 | moeCpsmoeApsmoeGpsmoeApsmoeGpsGpsTpsGpsApss?ApsGpsCpsGps |
| | | ApsApsmoeGpsmoeTpsmoeGpsmoeCpsmoeA |
| ASO-158 | 159 | moeCpsmoeApsmoeGpsmoeApsmoeGpsGpsTpsGpsApsApss?GpsCpsGps |
| | | ApsApsmoeGpsmoeTpsmoeGpsmoeCpsmoeA |
| ASO-159 | 160 | moeCpsmoeApsmoeGpsmoeApsmoeGpsGpsTpsGpsApsApsGpss?CpsGps |
| | | ApsApsmoeGpsmoeTpsmoeGpsmoeCpsmoeA |
| ASO-160 | 161 | moeCpsmoeApsmoeGpsmoeApsmoeGpsGpsTpsGpsApsApsGpsCpss?Gps |
| | | ApsApsmoeGpsmoeTpsmoeGpsmoeCpsmoeA |
| ASO-161 | 162 | moeCpsmoeApsmoeGpsmoeApsmoeGpsGpsTpsGpsApsApsGpsCps |
| | | Gpss?ApsApsmoeGpsmoeTpsmoeGpsmoeCpsmoeA |
| ASO-162 | 163 | moeCpsmoeApsmoeGpsmoeApsmoeGpsGpsTpsGpsApsApsGpsCpsGps |
| | | Apss?ApsmoeGpsmoeTpsmoeGpsmoeCpsmoeA |
| ASO-163 | 164 | moeCpsmoeApsmoeGpsmoeApsmoeGpsGpsTpsGpsApsApsGpsCpsGpsAps |
| | | Apss?moeGpsmoeTpsmoeGpsmoeCpsmoeA |
| ASO-164 | 165 | lnCpsmoeApsmoeGpsmoeApsmoeGpsGpsTpsGpsApsApsGpsCpsGpsAps |
| | | ApsmoeGpsmoeTpsmoeGpsmoeCpsmoeA |
| ASO-165 | 166 | moeCpslnApsmoeGpsmoeApsmoeGpsGpsTpsGpsApsApsGpsCpsGpsAps |
| | | ApsmoeGpsmoeTpsmoeGpsmoeCpsmoeA |
| ASO-166 | 167 | moeCpsmoeApslnGpsmoeApsmoeGpsGpsTpsGpsApsApsGpsCpsGpsAps |
| | | ApsmoeGpsmoeTpsmoeGpsmoeCpsmoeA |
| ASO-167 | 168 | moeCpsmoeApsmoeGpslnApsmoeGpsGpsTpsGpsApsApsGpsCpsGpsAps |
| | | ApsmoeGpsmoeTpsmoeGpsmoeCpsmoeA |
| ASO-168 | 169 | moeCpsmoeApsmoeGpsmoeApslnGpsGpsTpsGpsApsApsGpsCpsGpsAps |
| | | ApsmoeGpsmoeTpsmoeGpsmoeCpsmoeA |
| ASO-169 | 170 | moeCpsmoeApsmoeGpsmoeApsmoeGpsGpsTpsGpsApsApsGpsCpsGpsAps |
| | | ApslnGpsmoeTpsmoeGpsmoeCpsmoeA |
| ASO-170 | 171 | moeCpsmoeApsmoeGpsmoeApsmoeGpsGpsTpsGpsApsApsGpsCpsGpsAps |
| | | ApsmoeGpslnTpsmoeGpsmoeCpsmoeA |
| ASO-171 | 172 | moeCpsmoeApsmoeGpsmoeApsmoeGpsGpsTpsGpsApsApsGpsCpsGpsAps |
| | | ApsmoeGpsmoeTpslnGpsmoeCpsmoeA |
| ASO-172 | 173 | moeCpsmoeApsmoeGpsmoeApsmoeGpsGpsTpsGpsApsApsGpsCpsGpsAps |
| | | ApsmoeGpsmoeTpsmoeGpslnCpsmoeA |
| ASO-173 | 174 | moeCpsmoeApsmoeGpsmoeApsmoeGpsGpsTpsGpsApsApsGpsCpsGpsAps |
| | | ApsmoeGpsmoeTpsmoeGpsmoeCpslnA |
| ASO-174 | 175 | ln(5m)CpsmoeApsmoeGpsmoeApsmoeGpsGpsTpsGpsApsApsGps(5m)Cps |
| | | GpsApsApsmoeGpslnTpsmoeGpsmoe(5m)CpsmoeA |
| ASO-175 | 176 | ln(5m)CpsmoeApsmoeGpsmoeApsmoeGpsGpsTpsGpsApsApsGps(5m)Cps |
| | | GpsApsApsmoeGpsmoeTpsmoeGpsln(5m)CpsmoeA |
| ASO-176 | 177 | moe(5m)CpslnApsmoeGpslnApsmoeGpsGpsTpsGpsApsApsGps(5m)CpsGps |
| | | ApsApsmoeGpsmoeTpsmoeGpsmoe(5m)CpsmoeA |
| ASO-177 | 178 | moe(5m)CpslnApsmoeGpsmoeApsmoeGpsGpsTpsGpsApsApsGps(5m)Cps |
| | | GpsApsApsmoeGpsmoeTpsmoeGpsmoe(5m)CpslnA |
| ASO-178 | 179 | moe(5m)CpsmoeApsmoeGpslnApsmoeGpsGpsTpsGpsApsApsGps(5m)Cps |
| | | GpsApsApsmoeGpsmoeTpsmoeGpsmoe(5m)CpslnA |
| ASO-179 | 180 | moe(5m)CpsmoeApslnGpsmoeApslnGpsGpsTpsGpsApsApsGps(5m)CpsGps |
| | | ApsApsmoeGpsmoeTpsmoeGpsmoe(5m)CpsmoeA |
| ASO-180 | 181 | moe(5m)CpsmoeApsmoeGpsmoeApsmoeGpsGpsTpsGpsApsApsGps(5m)Cps |
| | | GpsApsApslnGpsmoeTpslnGpsmoe(5m)CpsmoeA |
| ASO-181 | 182 | moe(5m)CpsmoeApslnGpsmoeApsmoeGpsGpsTpsGpsApsApsGps(5m)Cps |
| | | GpsApsApslnGpsmoeTpsmoeGpsmoe(5m)CpsmoeA |
| ASO-182 | 183 | moe(5m)CpsmoeApslnGpsmoeApsmoeGpsGpsTpsGpsApsApsGps(5m)Cps |
| | | GpsApsApsmoeGpsmoeTpslnGpsmoe(5m)CpsmoeA |
| ASO-183 | 184 | moe(5m)CpsmoeApsmoeGpsmoeApslnGpsGpsTpsGpsApsApsGps(5m)Cps |
| | | GpsApsApsmoeGpsmoeTpslnGpsmoe(5m)CpsmoeA |
| ASO-184 | 185 | moe(5m)CpsmoeApsmoeGpsmoeApslnGpsGpsTpsGpsApsApsGps(5m)Cps |
| | | GpsApsApslnGpsmoeTpsmoeGpsmoe(5m)CpsmoeA |
| ASO-185 | 186 | moe(5m)CpsmoeApsmoeGpsmApsmoeGpsGpsTpsGpsApsAps(8nh)Gps(5m) |
| | | CpsGpsApsApsmoeGpsmoeTpsmoeGpsmoe(5m)CpsmoeA |
| ASO-186 | 187 | moe(5m)CpsmoeApsmoeGpsmoeApsmoeGpsmGpsTpsGpsApsAps(8nh)Gps |
| | | (5m)CpsGpsApsApsmoeGpsmoeTpsmoeGpsmoe(5m)CpsmoeA |
| ASO-187 | 188 | moe(5m)CpsmoeApsmoeGpsmApsmGpsGpsTpsGpsApsAps(8nh)Gps(5m) |
| | | CpsGpsApsApsmoeGpsmoeTpsmoeGpsmoe(5m)CpsmoeA |
| ASO-188 | 189 | moe(5m)CpsmoeApsmoeGpsmApsmGpsmGpsTpsGpsApsAps(8nh)Gps(5m) |
| | | CpsGpsApsApsmoeGpsmoeTpsmoeGpsmoe(5m)CpsmoeA |
| ASO-189 | 190 | moe(5m)CpsmoeApsmGpsmoeApsmGpsGpsTpsGpsApsAps(8nh)Gps(5m) |
| | | CpsGpsApsApsmoeGpsmoeTpsmoeGpsmoe(5m)CpsmoeA |
| ASO-190 | 191 | moe(5m)CpsmoeApsmoeGpsmoeApsmoeGpsGpsTpsGpsApsAps(8nh)Gps |
| | | (5m)CpsGpsApsApsmGpsmoeTpsmGpsmoe(5m)CpsmoeA |
| ASO-191 | 192 | moe(5m)CpsmoeApsmGpsmoeApsmGpsGpsTpsGpsApsAps(8nh)Gps(5m) |
| | | CpsGpsApsApsmGpsmoeTpsmoeGpsmoe(5m)CpsmoeA |
| ASO-192 | 193 | moe(5m)CpsmoeApsmGpsmoeApsmGpsGpsTpsGpsApsAps(8nh)Gps(5m) |
| | | CpsGpsApsApsmoeGpsmoeTpsmGpsmoe(5m)CpsmoeA |
| ASO-193 | 194 | moe(5m)CpsmoeApsmGpsmoeApsmoeGpsGpsTpsGpsApsAps(8nh)Gps(5m) |
| | | CpsGpsApsApsmGpsmoeTpsmGpsmoe(5m)CpsmoeA |
| ASO-194 | 195 | moe(5m)CpsmoeApsmoeGpsmoeApsmGpsGpsTpsGpsApsAps(8nh)Gps(5m) |
| | | CpsGpsApsApsmGpsmoeTpsmGpsmoe(5m)CpsmoeA |
| ASO-195 | 196 | moe(5m)CpsmoeApsmGpsmoeApsmGpsGpsTpsGpsApsAps(8nh)Gps(5m) |
| | | CpsGpsApsApsmGpsmoeTpsmGpsmoe(5m)CpsmoeA |
| ASO-196 | 197 | moe(5m)CpsmoeApsmoeGpsmoeApsmoeGpsGpsTpsGpsApsAps(8nh)Gps |
| | | (5m)CpsGpsApsApsmoeGpsmoeTpsmGpsm(5m)CpsmoeA |
| ASO-197 | 198 | moe(5m)CpsmoeApsmoeGpsmoeApsmoeGpsGpsTpsGpsApsAps(8nh)Gps |
| | | (5m)CpsGpsApsApsmoeGpsmoeTpsmGpsm(5m)CpsmA |
| ASO-198 | 199 | moe(5m)CpsmoeApsmoeGpsmoeApsmoeGpsGpsTpsGpsApsAps(8nh)Gps |
| | | (5m)CpsGpsApsApsmGpsmoeTpsmGpsmoe(5m)CpsmA |
| ASO-199 | 200 | ln(5m)CpsmoeApsmoeGpsmoeApsmoeGpsGpsTpsGpsApsAps(8nh)Gps(5m) |
| | | CpsGpsApsApsmoeGpsmoeTpsmoeGpsmoe(5m)CpsmoeA |
| ASO-200 | 201 | moe(5m)CpslnApsmoeGpsmoeApsmoeGpsGpsTpsGpsApsAps(8nh)Gps(5m) |
| | | CpsGpsApsApsmoeGpsmoeTpsmoeGpsmoe(5m)CpsmoeA |
| ASO-201 | 202 | moe(5m)CpsmoeApslnGpsmoeApsmoeGpsGpsTpsGpsApsAps(8nh)Gps(5m) |
| | | CpsGpsApsApsmoeGpsmoeTpsmoeGpsmoe(5m)CpsmoeA |
| ASO-202 | 203 | moe(5m)CpsmoeApsmoeGpslnApsmoeGpsGpsTpsGpsApsAps(8nh)Gps(5m) |
| | | CpsGpsApsApsmoeGpsmoeTpsmoeGpsmoe(5m)CpsmoeA |
| ASO-203 | 204 | moe(5m)CpsmoeApsmoeGpsmoeApslnGpsGpsTpsGpsApsAps(8nh)Gps(5m) |
| | | CpsGpsApsApsmoeGpsmoeTpsmoeGpsmoe(5m)CpsmoeA |
| ASO-204 | 205 | moe(5m)CpsmoeApsmoeGpsmoeApsmoeGpsGpsTpsGpsApsAps(8nh)Gps |
| | | (5m)CpsGpsApsApslnGpsmoeTpsmoeGpsmoe(5m)CpsmoeA |
| ASO-205 | 206 | moe(5m)CpsmoeApsmoeGpsmoeApsmoeGpsGpsTpsGpsApsAps(8nh)Gps |
| | | (5m)CpsGpsApsApsmoeGpslnTpsmoeGpsmoe(5m)CpsmoeA |
| ASO-206 | 207 | moe(5m)CpsmoeApsmoeGpsmoeApsmoeGpsGpsTpsGpsApsAps(8nh)Gps |
| | | (5m)CpsGpsApsApsmoeGpsmoeTpslnGpsmoe(5m)CpsmoeA |
| ASO-207 | 208 | moe(5m)CpsmoeApsmoeGpsmoeApsmoeGpsGpsTpsGpsApsAps(8nh)Gps |
| | | (5m)CpsGpsApsApsmoeGpsmoeTpsmoeGpsln(5m)CpsmoeA |
| ASO-208 | 209 | moe(5m)CpsmoeApsmoeGpsmoeApsmoeGpsGpsTpsGpsApsAps(8nh)Gps |
| | | (5m)CpsGpsApsApsmoeGpsmoeTpsmoeGpsmoe(5m)CpslnA |
| ASO-209 | 210 | ln(5m)CpsmoeApsmoeGpsmoeApsmoeGpsGpsTpsGpsApsAps(8nh)Gps(5m) |
| | | CpsGpsApsApsmoeGpslnTpsmoeGpsmoe(5m)CpsmoeA |
| ASO-210 | 211 | ln(5m)CpsmoeApsmoeGpsmoeApsmoeGpsGpsTpsGpsApsAps(8nh)Gps(5m) |
| | | CpsGpsApsApsmoeGpsmoeTpsmoeGpsln(5m)CpsmoeA |
| ASO-211 | 212 | moe(5m)CpslnApsmoeGpslnApsmoeGpsGpsTpsGpsApsAps(8nh)Gps(5m) |
| | | CpsGpsApsApsmoeGpsmoeTpsmoeGpsmoe(5m)CpsmoeA |
| ASO-212 | 213 | moe(5m)CpslnApsmoeGpsmoeApsmoeGpsGpsTpsGpsApsAps(8nh)Gps(5m) |
| | | CpsGpsApsApsmoeGpsmoeTpsmoeGpsmoe(5m)CpslnA |
| ASO-213 | 214 | moe(5m)CpsmoeApsmoeGpslnApsmoeGpsGpsTpsGpsApsAps(8nh)Gps(5m) |
| | | CpsGpsApsApsmoeGpsmoeTpsmoeGpsmoe(5m)CpslnA |
| ASO-214 | 215 | moe(5m)CpsmoeApslnGpsmoeApslnGpsGpsTpsGpsApsAps(8nh)Gps(5m) |
| | | CpsGpsApsApsmoeGpsmoeTpsmoeGpsmoe(5m)CpsmoeA |
| ASO-215 | 216 | moe(5m)CpsmoeApsmoeGpsmoeApsmoeGpsGpsTpsGpsApsAps(8nh)Gps |
| | | (5m)CpsGpsApsApslnGpsmoeTpslnGpsmoe(5m)CpsmoeA |
| ASO-216 | 217 | moe(5m)CpsmoeApslnGpsmoeApsmoeGpsGpsTpsGpsApsAps(8nh)Gps(5m) |
| | | CpsGpsApsApslnGpsmoeTpsmoeGpsmoe(5m)CpsmoeA |
| ASO-217 | 218 | moe(5m)CpsmoeApslnGpsmoeApsmoeGpsGpsTpsGpsApsAps(8nh)Gps(5m) |
| | | CpsGpsApsApsmoeGpsmoeTpslnGpsmoe(5m)CpsmoeA |
| ASO-218 | 219 | moe(5m)CpsmoeApsmoeGpsmoeApslnGpsGpsTpsGpsApsAps(8nh)Gps(5m) |
| | | CpsGpsApsApslnGpsmoeTpsmoeGpsmoe(5m)CpsmoeA |
| ASO-219 | 220 | moe(5m)CpsmoeApsmoeGpsmoeApslnGpsGpsTpsGpsApsAps(8nh)Gps(5m) |
| | | CpsGpsApsApsmoeGpsmoeTpslnGpsmoe(5m)CpsmoeA |
| ASO-220 | 221 | moe(5m)CpslnApslnGpsmoeApslnGpsGpsTpsGpsApsAps(8nh)Gps(5m)Cps |
| | | GpsApsApsmoeGpsmoeTpsmoeGpsmoe(5m)CpsmoeA |
| ASO-221 | 222 | moe(5m)CpslnApsmoeGpslnApslnGpsGpsTpsGpsApsAps(8nh)Gps(5m)Cps |
| | | GpsApsApsmoeGpsmoeTpsmoeGpsmoe(5m)CpsmoeA |
| ASO-222 | 223 | moe(5m)CpsmoeApsmoeGpsmoeApsmoeGpsGpsTpsGpsApsAps(8nh)Gps |
| | | (5m)CpsGpsApsApslnGpsmoeTpslnGpsmoe(5m)CpslnA |
| ASO-223 | 224 | moe(5m)CpslnApslnGpsmoeApslnGpsGpsTpsGpsApsApsGps(5m)CpsGps |
| | | ApsApsmoeGpsmoeTpsmoeGpsmoe(5m)CpsmoeA |
| ASO-224 | 225 | moe(5m)CpslnApsmoeGpslnApslnGpsGpsTpsGpsApsApsGps(5m)CpsGps |
| | | ApsApsmoeGpsmoeTpsmoeGpsmoe(5m)CpsmoeA |
| ASO-225 | 226 | moe(5m)CpsmoeApsmoeGpsmoeApsmoeGpsGpsTpsGpsApsApsGps(5m)Cps |
| | | GpsApsApslnGpsmoeTpslnGpsmoe(5m)CpslnA |
| ASO-226 | 227 | moeGpsmoe(5m)CpsmoeApsmoeGpsApsGpsGpsTpsGpsmXpsApsGps(5m) |
| | | CpsGpsApsmoeApslnGpsmoeTpslnGpsln(5m)C |
| ASO-227 | 228 | moe(5m)CpsmoeApsmoeGpsmoeApsmoeGpsGpsr?TpsGpsApsApsGps(5m) |
| | | CpsGpsApsApsmoeGpsmoeTpsmoeGpsmoe(5m)CpsmoeA |
| ASO-228 | 229 | moe(5m)CpsmoeApsmoeGpsmoeApsmoeGpsGpsTpsr?GpsApsApsGps(5m) |
| | | CpsGpsApsApsmoeGpsmoeTpsmoeGpsmoe(5m)CpsmoeA |
| ASO-229 | 230 | moe(5m)CpsmoeApsmoeGpsmoeApsmoeGpsGpsTpsGpsr?ApsApsGps(5m) |
| | | CpsGpsApsApsmoeGpsmoeTpsmoeGpsmoe(5m)CpsmoeA |
| ASO-230 | 231 | moe(5m)CpsmoeApsmoeGpsmoeApsmoeGpsGpsTpsGpsApsr?ApsGps(5m) |
| | | CpsGpsApsApsmoeGpsmoeTpsmoeGpsmoe(5m)CpsmoeA |
| ASO-231 | 232 | moe(5m)CpsmoeApsmoeGpsmoeApsmoeGpsGpsTpsGpsApsApsr?Gps(5m) |
| | | CpsGpsApsApsmoeGpsmoeTpsmoeGpsmoe(5m)CpsmoeA |
| ASO-232 | 233 | moe(5m)CpsmoeApsmoeGpsmoeApsmoeGpsGpsTpsGpsApsApsGpsr?(5m) |
| | | CpsGpsApsApsmoeGpsmoeTpsmoeGpsmoe(5m)CpsmoeA |
| ASO-233 | 234 | moe(5m)CpsmoeApsmoeGpsmoeApsmoeGpsGpsTpsGpsApsApsGps(5m) |
| | | Cpsr?GpsApsApsmoeGpsmoeTpsmoeGpsmoe(5m)CpsmoeA |
| ASO-234 | 235 | moe(5m)CpsmoeApsmoeGpsmoeApsmoeGpsGpsTpsGpsApsApsGps(5m) |
| | | CpsGpsr?ApsApsmoeGpsmoeTpsmoeGpsmoe(5m)CpsmoeA |
| ASO-235 | 236 | moe(5m)CpsmoeApsmoeGpsmoeApsmoeGpsGpsTpsGpsApsApsGps(5m) |
| | | CpsGpsApsr?ApsmoeGpsmoeTpsmoeGpsmoe(5m)CpsmoeA |
| ASO-236 | 237 | moe(5m)CpsmoeApsmoeGpsmoeApsmoeGpsGpsTpsGpsApsApsGps(5m) |
| | | CpsGpsApsApsr?moeGpsmoeTpsmoeGpsmoe(5m)CpsmoeA |
| ASO-237 | 238 | moeApsmoeGpsmoeGpsmoeTpsmoeGps(8nh)ApsApsGps(5m)CpsGpsAps |
| | | ApsGpsTpsGpsmoe(5m)CpsmoeApsmoe(5m)CpsmoeApsmoe(5m)C |
| ASO-238 | 239 | moeApsmoeGpsmoeGpsmoeTpsmoeGpsAps(8nh)ApsGps(5m)CpsGpsAps |
| | | ApsGpsTpsGpsmoe(5m)CpsmoeApsmoe(5m)CpsmoeApsmoe(5m)C |
| ASO-239 | 240 | moeApsmoeGpsmoeGpsmoeTpsmoeGpsApsAps(8nh)Gps(5m)CpsGpsAps |
| | | ApsGpsTpsGpsmoe(5m)CpsmoeApsmoe(5m)CpsmoeApsmoe(5m)C |
| ASO-240 | 241 | moeApsmoeGpsmoeGpsmoeTpsmoeGpsApsApsGps(5oh)CpsGpsApsAps |
| | | GpsTpsGpsmoe(5m)CpsmoeApsmoe(5m)CpsmoeApsmoe(5m)C |
| ASO-241 | 242 | moeApsmoeGpsmoeGpsmoeTpsmoeGpsApsApsGps(5m)Cps(8nh)GpsAps |
| | | ApsGpsTpsGpsmoe(5m)CpsmoeApsmoe(5m)CpsmoeApsmoe(5m)C |
| ASO-242 | 243 | moeApsmoeGpsmoeGpsmoeTpsmoeGpsApsApsGps(5m)CpsGps(8nh)Aps |
| | | ApsGpsTpsGpsmoe(5m)CpsmoeApsmoe(5m)CpsmoeApsmoe(5m)C |
| ASO-243 | 244 | moeApsmoeGpsmoeGpsmoeTpsmoeGpsApsApsGps(5m)CpsGpsAps(8nh) |
| | | ApsGpsTpsGpsmoe(5m)CpsmoeApsmoe(5m)CpsmoeApsmoe(5m)C |
| ASO-244 | 245 | moeApsmoeGpsmoeGpsmoeTpsmoeGpsApsApsGps(5m)CpsGpsApsAps |
| | | (8nh)GpsTpsGpsmoe(5m)CpsmoeApsmoe(5m)CpsmoeApsmoe(5m)C |
| ASO-245 | 246 | moeApsmoeGpsmoeGpsmoeTpsmoeGpsApsApsGps(5m)CpsGpsApsAps |
| | | Gps(2s)TpsGpsmoe(5m)CpsmoeApsmoe(5m)CpsmoeApsmoe(5m)C |
| ASO-246 | 247 | moeApsmoeGpsmoeGpsmoeTpsmoeGpsApsApsGps(5m)CpsGpsApsAps |
| | | GpsTps(8nh)Gpsmoe(5m)CpsmoeApsmoe(5m)CpsmoeApsmoe(5m)C |
| ASO-247 | 248 | moe(5m)CpsmoeApsmoeGpsmoeApsmoeGpsGpss?Tpss?Gpsr?ApsApsGps |
| | | (5m)CpsGpsApsApsmoeGpsmoeTpsmoeGpsmoe(5m)CpsmoeA |
| ASO-248 | 249 | moe(5m)CpsmoeApsmoeGpsmoeApsmoeGpsGpsr?Tpsr?Gpss?ApsApsGps |
| | | (5m)CpsGpsApsApsmoeGpsmoeTpsmoeGpsmoe(5m)CpsmoeA |
| ASO-249 | 250 | moeApsmoe(5m)CpsmoeGpsmoeTpsmoeGps(5m)Cpss?ApsGpsApsGpsGps |
| | | TpsGpsApsApsmoeGpsmoe(5m)CpsmoeGpsmoeApsmoeA |
| ASO-250 | 251 | moeApsmoe(5m)CpsmoeGpsmoeTpsmoeGps(5m)CpsApss?GpsApsGpsGps |
| | | TpsGpsApsApsmoeGpsmoe(5m)CpsmoeGpsmoeApsmoeA |
| ASO-251 | 252 | moeApsmoe(5m)CpsmoeGpsmoeTpsmoeGps(5m)CpsApsGpss?ApsGpsGps |
| | | TpsGpsApsApsmoeGpsmoe(5m)CpsmoeGpsmoeApsmoeA |
| ASO-252 | 253 | moeApsmoe(5m)CpsmoeGpsmoeTpsmoeGps(5m)CpsApsGpsApss?GpsGps |
| | | TpsGpsApsApsmoeGpsmoe(5m)CpsmoeGpsmoeApsmoeA |
| ASO-253 | 254 | moeApsmoe(5m)CpsmoeGpsmoeTpsmoeGps(5m)CpsApsGpsApsGpss?Gps |
| | | TpsGpsApsApsmoeGpsmoe(5m)CpsmoeGpsmoeApsmoeA |
| ASO-254 | 255 | moeApsmoe(5m)CpsmoeGpsmoeTpsmoeGps(5m)CpsApsGpsApsGpsGpss? |
| | | TpsGpsApsApsmoeGpsmoe(5m)CpsmoeGpsmoeApsmoeA |
| ASO-255 | 256 | moeApsmoe(5m)CpsmoeGpsmoeTpsmoeGps(5m)CpsApsGpsApsGpsGps |
| | | Tpss?GpsApsApsmoeGpsmoe(5m)CpsmoeGpsmoeApsmoeA |
| ASO-256 | 257 | moeApsmoe(5m)CpsmoeGpsmoeTpsmoeGps(5m)CpsApsGpsApsGpsGps |
| | | TpsGpss?ApsApsmoeGpsmoe(5m)CpsmoeGpsmoeApsmoeA |
| ASO-257 | 258 | moeApsmoe(5m)CpsmoeGpsmoeTpsmoeGps(5m)CpsApsGpsApsGpsGps |
| | | TpsGpsApss?ApsmoeGpsmoe(5m)CpsmoeGpsmoeApsmoeA |
| ASO-258 | 259 | moeApsmoe(5m)CpsmoeGpsmoeTpsmoeGps(5m)CpsApsGpsApsGpsGps |
| | | TpsGpsApsApss?moeGpsmoe(5m)CpsmoeGpsmoeApsmoeA |
| ASO-259 | 260 | moeApsmoe(5m)CpsmoeGpsmoeTpsmoeGps(5m)Cpsr?ApsGpsApsGpsGps |
| | | TpsGpsApsApsmoeGpsmoe(5m)CpsmoeGpsmoeApsmoeA |
| ASO-260 | 261 | moeApsmoe(5m)CpsmoeGpsmoeTpsmoeGps(5m)CpsApsr?GpsApsGpsGps |
| | | TpsGpsApsApsmoeGpsmoe(5m)CpsmoeGpsmoeApsmoeA |
| ASO-261 | 262 | moeApsmoe(5m)CpsmoeGpsmoeTpsmoeGps(5m)CpsApsGpsr?ApsGpsGps |
| | | TpsGpsApsApsmoeGpsmoe(5m)CpsmoeGpsmoeApsmoeA |
| ASO-262 | 263 | moeApsmoe(5m)CpsmoeGpsmoeTpsmoeGps(5m)CpsApsGpsApsr?GpsGps |
| | | TpsGpsApsApsmoeGpsmoe(5m)CpsmoeGpsmoeApsmoeA |
| ASO-263 | 264 | moeApsmoe(5m)CpsmoeGpsmoeTpsmoeGps(5m)CpsApsGpsApsGpsr?Gps |
| | | TpsGpsApsApsmoeGpsmoe(5m)CpsmoeGpsmoeApsmoeA |
| ASO-264 | 265 | moeApsmoe(5m)CpsmoeGpsmoeTpsmoeGps(5m)CpsApsGpsApsGpsGpsr? |
| | | TpsGpsApsApsmoeGpsmoe(5m)CpsmoeGpsmoeApsmoeA |
| ASO-265 | 266 | moeApsmoe(5m)CpsmoeGpsmoeTpsmoeGps(5m)CpsApsGpsApsGpsGps |
| | | Tpsr?GpsApsApsmoeGpsmoe(5m)CpsmoeGpsmoeApsmoeA |
| ASO-266 | 267 | moeApsmoe(5m)CpsmoeGpsmoeTpsmoeGps(5m)CpsApsGpsApsGpsGps |
| | | TpsGpsr?ApsApsmoeGpsmoe(5m)CpsmoeGpsmoeApsmoeA |
| ASO-267 | 268 | moeApsmoe(5m)CpsmoeGpsmoeTpsmoeGps(5m)CpsApsGpsApsGpsGps |
| | | TpsGpsApsr?ApsmoeGpsmoe(5m)CpsmoeGpsmoeApsmoeA |
| ASO-268 | 269 | moeApsmoe(5m)CpsmoeGpsmoeTpsmoeGps(5m)CpsApsGpsApsGpsGps |
| | | TpsGpsApsApsr?moeGpsmoe(5m)CpsmoeGpsmoeApsmoeA |
| ASO-269 | 270 | moe(5m)CpsmoeApslnGpsmoeApslnGpsGpsTpsGpsApsApsGps(5m)CpsGps |
| | | ApsApsmoeGpsmoeTpslnGpsm(5m)CpsmA |
| ASO-270 | 271 | moe(5m)CpsmoeApsmoeGpsmoeApslnGpsGpsTpsGpsApsApsGps(5m)Cps |
| | | GpsApsApsmoeGpsmoeTpslnGpsm(5m)CpsmA |
| ASO-271 | 272 | moe(5m)CpsmoeApslnGpsmoeApsmoeGpsGpsTpsGpsApsApsGps(5m)Cps |
| | | GpsApsApsmoeGpsmoeTpslnGpsm(5m)CpsmA |
| ASO-272 | 273 | moe(5m)CpsmoeApsmoeGpsmoeApsmoeGpsGpsTpsGpsApsApsGps(5m) |
| | | CpsGpsApsApsmoeGpsmoeTpslnGpsm(5m)CpsmA |
| ASO-273 | 274 | moe(5m)CpsmoeApslnGpsmoeApslnGpsGpsTpsGpsApsApsGps(5m)Cps |
| | | GpsApsApsmoeGpsmoeTpsmGpsm(5m)CpsmA |
| ASO-274 | 275 | moe(5m)CpsmoeApsmoeGpsmoeApslnGpsGpsTpsGpsApsApsGps(5m)Cps |
| | | GpsApsApsmoeGpsmoeTpsmGpsm(5m)CpsmA |
| ASO-275 | 276 | moe(5m)CpsmoeApslnGpsmoeApsmoeGpsGpsTpsGpsApsApsGps(5m)Cps |
| | | GpsApsApsmoeGpsmoeTpsmGpsm(5m)CpsmA |
| ASO-276 | 277 | rGrCrCrCrGrUrCrUrGrUrUrGrUrGrUrGrArCrUrC |
| ASO-277 | 278 | moe(5m)CpsmoeApslnGpsmoeApsmoeGpsGpsTpsGpsApsApsGps(5m)Cps |
| | | GpsApsApsmGpsmoeTpsmGpsmoe(5m)CpsmA |
| ASO-278 | 279 | moe(5m)CpsmoeApsmoeGpsmoeApslnGpsGpsTpsGpsApsApsGps(5m)Cps |
| | | GpsApsApsmGpsmoeTpsmGpsmoe(5m)CpsmA |
| ASO-279 | 280 | moe(5m)CpsmoeApslnGpsmoeApslnGpsGpsTpsGpsApsApsGps(5m)CpsGps |
| | | ApsApsmGpsmoeTpsmGpsmoe(5m)CpsmA |
| ASO-280 | 281 | moe(5m)CpsmoeApsmoeGpsmoeApsmoeGpsGpsTpsGpsApsApsGps(5m) |
| | | CpsGpsApsApsmGpsmoeTpslnGpsmoe(5m)CpsmA |
| ASO-281 | 282 | moe(5m)CpsmoeApslnGpsmoeApsmoeGpsGpsTpsGpsApsApsGps(5m)Cps |
| | | GpsApsApsmGpsmoeTpslnGpsmoe(5m)CpsmA |
| ASO-282 | 283 | moe(5m)CpsmoeApsmoeGpsmoeApslnGpsGpsTpsGpsApsApsGps(5m)Cps |
| | | GpsApsApsmGpsmoeTpslnGpsmoe(5m)CpsmA |
| ASO-283 | 284 | moe(5m)CpsmoeApslnGpsmoeApslnGpsGpsTpsGpsApsApsGps(5m)CpsGps |
| | | ApsApsmGpsmoeTpslnGpsmoe(5m)CpsmA |
| ASO-284 | 285 | moeApsmoe(5m)CpsmGpsmoeTpsmGps(5m)CpsApsGpsApsGpsGpsTpsGps |
| | | ApsApsmoeGpsmoe(5m)CpsmoeGpsmoeApsmoeA |
| ASO-285 | 286 | moeApsmoe(5m)CpsmoeGpsmoeTpsmoeGps(5m)CpsApsGpsApsGpsGpsTps |
| | | GpsApsApsmGpsmoe(5m)CpsmGpsmoeApsmoeA |
| ASO-286 | 287 | moeApsmoe(5m)CpsmGpsmoeTpsmGps(5m)CpsApsGpsApsGpsGpsTpsGps |
| | | ApsApsmGpsmoe(5m)CpsmoeGpsmoeApsmoeA |
| ASO-287 | 288 | moeApsmoe(5m)CpsmGpsmoeTpsmGps(5m)CpsApsGpsApsGpsGpsTpsGps |
| | | ApsApsmoeGpsmoe(5m)CpsmGpsmoeApsmoeA |
| ASO-288 | 289 | moeApsmoe(5m)CpsmGpsmoeTpsmoeGps(5m)CpsApsGpsApsGpsGpsTps |
| | | GpsApsApsmGpsmoe(5m)CpsmGpsmoeApsmoeA |
| ASO-289 | 290 | moeApsmoe(5m)CpsmoeGpsmoeTpsmGps(5m)CpsApsGpsApsGpsGpsTps |
| | | GpsApsApsmGpsmoe(5m)CpsmGpsmoeApsmoeA |
| ASO-290 | 291 | moeApsmoe(5m)CpsmGpsmoeTpsmGps(5m)CpsApsGpsApsGpsGpsTpsGps |
| | | ApsApsmGpsmoe(5m)CpsmGpsmoeApsmoeA |
| ASO-291 | 292 | moeApsmoe(5m)CpsmoeGpsmoeTpsmoeGps(5m)CpsApsGpsApsGpsGps |
| | | TpsGpsApsmApsmGpsmoe(5m)CpsmoeGpsmoeApsmoeA |
| ASO-292 | 293 | moeApsmoe(5m)CpsmoeGpsmoeTpsmoeGps(5m)CpsApsGpsApsGpsGps |
| | | TpsGpsApsApsmGpsmoe(5m)CpsmGpsmApsmoeA |
| ASO-293 | 294 | moeApsmoe(5m)CpsmoeGpsmoeTpsmoeGps(5m)CpsApsGpsApsGpsGps |
| | | TpsGpsApsApsmGpsmoe(5m)CpsmGpsmoeApsmA |
| ASO-294 | 295 | moeApsmoe(5m)CpsmoeGpsmoeTpsmoeGps(5m)CpsApsGpsApsGpsGps |
| | | TpsGpsApsApsmGpsmoe(5m)CpsmoeGpsmApsmA |
| ASO-295 | 296 | moeApsmoe(5m)CpsmoeGpsmoeTpsmoeGps(5m)CpsApsGpsApsGpsGps |
| | | TpsGpsApsApsmoeGpsmoe(5m)CpsmGpsmApsmA |
| ASO-296 | 297 | moeApsmoe(5m)CpsmoeGpsmoeTpsmGpsm(5m)CpsApsGpsApsGpsGps |
| | | TpsGpsApsApsmoeGpsmoe(5m)CpsmoeGpsmoeApsmoeA |
| ASO-297 | 298 | moeApsmoe(5m)CpsmoeGpsmoeTpsmoeGps(5m)CpsApsGpsApsGpsGps |
| | | TpsGpsApsApsmGpsm(5m)CpsmoeGpsmoeApsmoeA |
| ASO-298 | 299 | moeApsmoe(5m)CpsmoeGpsmoeTpsmoeGps(5m)CpsApsGpsApsGpsGps |
| | | TpsGpsApsApsmGpsm(5m)CpsmGpsmoeApsmoeA |
| ASO-299 | 300 | moeApsmoe(5m)CpsmoeGpsmoeTpsmGpsm(5m)CpsmApsGpsApsGpsGps |
| | | TpsGpsApsApsmoeGpsmoe(5m)CpsmoeGpsmoeApsmoeA |
| ASO-300 | 301 | moe(5m)CpsmoeApsmoeGpsmoeApsmoeGpsocpGpsTpsGpsApsApsGps(5m) |
| | | CpsGpsApsApsmoeGpsmoeTpsmoeGpsmoe(5m)CpsmoeA |
| ASO-301 | 302 | moe(5m)CpsmoeApsmoeGpsmoeApsmoeGpsGpsocpUpsGpsApsApsGps(5m) |
| | | CpsGpsApsApsmoeGpsmoeTpsmoeGpsmoe(5m)CpsmoeA |
| ASO-302 | 303 | moe(5m)CpsmoeApsmoeGpsmoeApsmoeGpsGpsTpsocpGpsApsApsGps(5m) |
| | | CpsGpsApsApsmoeGpsmoeTpsmoeGpsmoe(5m)CpsmoeA |
| ASO-303 | 304 | moe(5m)CpsmoeApsmoeGpsmoeApsmoeGpsomcpGpsTpsGpsApsApsGps |
| | | (5m)CpsGpsApsApsmoeGpsmoeTpsmoeGpsmoe(5m)CpsmoeA |
| ASO-304 | 305 | moe(5m)CpsmoeApsmoeGpsmoeApsmoeGpsGpsomcpUpsGpsApsApsGps |
| | | (5m)CpsGpsApsApsmoeGpsmoeTpsmoeGpsmoe(5m)CpsmoeA |
| ASO-305 | 306 | moe(5m)CpsmoeApsmoeGpsmoeApsmoeGpsGpsTpsomcpGpsApsApsGps |
| | | (5m)CpsGpsApsApsmoeGpsmoeTpsmoeGpsmoe(5m)CpsmoeA |
| ASO-306 | 307 | moe(5m)CpsmoeApsmoeGpsmoeApsmoeGpsGpsTpsGpsApsApsGps(5m) |
| | | CpsGpsApsApsmoeGpsmoeTpsmoeGpsmoe(5m)CpsmoeA |
| ASO-307 | 308 | moe(5m)CpsmoeApsmoeGpsmoeApsmoeGpsGpslmUpsGpsApsApsGps(5m) |
| | | CpsGpsApsApsmoeGpsmoeTpsmoeGpsmoe(5m)CpsmoeA |
| ASO-308 | 309 | moe(5m)CpsmoeApsmoeGpsmoeApsmoeGpsGpsTpslmGpsApsApsGps(5m) |
| | | CpsGpsApsApsmoeGpsmoeTpsmoeGpsmoe(5m)CpsmoeA |
| ASO-309 | 310 | moeApsmoe(5m)CpsmoeGpsmoeTpsmoeGpsocpCpsApsGpsApsGpsGpsTps |
| | | GpsApsApsmoeGpsmoe(5m)CpsmoeGpsmoeApsmoeA |
| ASO-310 | 311 | moeApsmoe(5m)CpsmoeGpsmoeTpsmoeGps(5m)CpsocpApsGpsApsGpsGps |
| | | TpsGpsApsApsmoeGpsmoe(5m)CpsmoeGpsmoeApsmoeA |
| ASO-311 | 312 | moeApsmoe(5m)CpsmoeGpsmoeTpsmoeGps(5m)CpsApsocpGpsApsGpsGps |
| | | TpsGpsApsApsmoeGpsmoe(5m)CpsmoeGpsmoeApsmoeA |
| ASO-312 | 313 | moeApsmoe(5m)CpsmoeGpsmoeTpsmoeGpsomcpCpsApsGpsApsGpsGpsTps |
| | | GpsApsApsmoeGpsmoe(5m)CpsmoeGpsmoeApsmoeA |
| ASO-313 | 314 | moeApsmoe(5m)CpsmoeGpsmoeTpsmoeGps(5m)CpsomcpApsGpsApsGps |
| | | GpsTpsGpsApsApsmoeGpsmoe(5m)CpsmoeGpsmoeApsmoeA |
| ASO-314 | 315 | moeApsmoe(5m)CpsmoeGpsmoeTpsmoeGps(5m)CpsApsomcpGpsApsGps |
| | | GpsTpsGpsApsApsmoeGpsmoe(5m)CpsmoeGpsmoeApsmoeA |
| ASO-315 | 316 | moeApsmoe(5m)CpsmoeGpsmoeTpsmoeGpslmCpsApsGpsApsGpsGpsTps |
| | | GpsApsApsmoeGpsmoe(5m)CpsmoeGpsmoeApsmoeA |
| ASO-316 | 317 | moeApsmoe(5m)CpsmoeGpsmoeTpsmoeGps(5m)CpslmApsGpsApsGpsGps |
| | | TpsGpsApsApsmoeGpsmoe(5m)CpsmoeGpsmoeApsmoeA |
| ASO-317 | 318 | moeApsmoe(5m)CpsmoeGpsmoeTpsmoeGps(5m)CpsApslmGpsApsGpsGps |
| | | TpsGpsApsApsmoeGpsmoe(5m)CpsmoeGpsmoeApsmoeA |
| ASO-318 | 319 | moeGpsmoeApsmoeGpsmoeGpsmoeTpsGpsApsApsGps(5m)CpsGpsApsAps |
| | | GpsTpsmoeGps(moe5m)CpsmoeAps(moe5m)CpsmoeA |
| ASO-319 | 320 | moeGpsmoeTpsmoeGps(moe5m)CpsmoeApsGpsApsGpsGpsTpsGpsApsAps |
| | | Gps(5m)CpsmoeGpsmoeApsmoeApsmoeGpsmoeT |
| ASO-332 | 353 | mGpsmCpsmApsmCpsmUpsrUprCprGpdCprUprUpdCprAprCprCpsrUpsm |
| | | CpsrUpsmGpsmC |
| ASO-333 | 354 | mGpsmCpsmApsmCpsmUpsrUprUprGprUprUprUprUprAprUprUpsmUpsm |
| | | CpsmUpsmGpsmC |
| ASO-334 | 355 | mGpsmUpsmApsmUpsmUpsrUprUprGprUprUprUprUprAprUprUpsmUpsm |
| | | UpsmUpsmGpsmU |
| ASO-335 | 356 | mGpsmUpsmApsrUpsrUprUprUprGprUprUprUprUprAprUprUprUpsrUpsm |
| | | UpsmGpsmU |
| ASO-336 | 357 | mGpsmCpsmApsmCpsrUpsrUpdCprGpdCprUprUpdCprApdCprCpsrUpsm |
| | | CpsrUpsmGpsmC |
| ASO-337 | 358 | mGpsmCpsmApsmCpsrUpsrUpdCprGpdCprUprUpdCprApdCpdCpsrUpsm |
| | | CpsrUpsmGpsmC |
| ASO-338 | 359 | mGpsmCpsmApsmCprUprUpdCprGpdCprUprUpdCprApdCpdCprUpmCpsr |
| | | UpsmGpsmC |
| ASO-339 | 360 | mGpsmCpsmApsmCprUprUpdCprGpdCprUprUpdCprApdCpdCprUpmCpr |
| | | UpmGpsmC |
| ASO-343 | 364 | mGpsmCpsmApsmCpsmUpsrUprCprGprCprUprUprCprAprCprCpsrUpsm |
| | | CpsrUpsmGpsmC |
| ASO-344 | 365 | mGpsmCpsmApsmCpsrUpsrUprCprGprCprUprUprCprAprCprCpsrUpsmCpsr |
| | | UpsmGpsmC |
| ASO-345 | 366 | mGpsmCpsmApsmCprUprUprCprGprCprUprUprCprAprCprCpsrUpsmCpsr |
| | | UpsmGpsmC |
| ASO-346 | 367 | mGpsmCpsmApsmCprUprUprCprGprCprUprUprCprAprCprCprUpmCpsr |
| | | UpsmGpsmC |
| ASO-347 | 368 | mGpsmCpsmApsmCprUprUprCprGprCprUprUprCprAprCprCprUpmCprUpm |
| | | GpsmC |
| ASO-348 | 369 | mGpsmCpsmApsmCpsmUpsrUprUprGprCprUprUprCprAprCprCpsmUpsm |
| | | CpsmUpsmGpsmC |
| ASO-349 | 370 | mGpsmCpsmApsmCpsmUpsrUprCprGprUprUprUprCprAprCprCpsmUpsm |
| | | CpsmUpsmGpsmC |
| ASO-350 | 371 | mGpsmCpsmApsmCpsmUpsrUprCprGprCprUprUprCprAprCprUpsmUpsm |
| | | CpsmUpsmGpsmC |
| ASO-351 | 372 | mGpsmCpsmApsmUpsmUpsrUprCprGprCprUprUprCprAprCprCpsmUpsm |
| | | CpsmUpsmGpsmC |
| ASO-352 | 373 | mGpsmCpsmApsmCpsmUpsrUprCprGprCprUprUprCprAprCprCpsmUpsm |
| | | UpsmUpsmGpsmC |
| ASO-353 | 374 | mGpsmCpsmApsmCpsmUpsrUprUprGprCprUprUprCprAprCprUpsmUpsm |
| | | CpsmUpsmGpsmC |
| ASO-354 | 375 | mGpsmCpsmApsmCpsmUpsrUprUprGprUprUprUprCprAprCprCpsmUpsm |
| | | CpsmUpsmGpsmC |
| ASO-355 | 376 | mGpsmCpsmApsmUpsmUpsrUprCprGprCprUprUprCprAprCprCpsmUpsm |
| | | UpsmUpsmGpsmC |
| ASO-356 | 377 | rCprGprCprGprCprGprCprGprCprAprGprAprAprGprCprGprUprGprCprGprC |
| ASO-357 | 378 | rCprGprGprCprUprCprGprGprCprAprGprAprAprGprCprCprGprGprGprCprC |
| ASO-358 | 379 | rGprCprAprCprUprUprCprGprCprUprUprCprAprCprCprUprCprUprGprC |
| ASO-359 | 380 | rCprUprCprUprCprUprCprUprCprUprCprUprCprUprCprUprCprUprGprU |
| ASO-360 | 381 | rCprUprCprUprCprUprGprUprCprUprGprUprCprUprGprUprCprUprGprU |
| ASO-361 | 382 | rCprUprGprUprCprUprGprUprCprUprGprUprCprUprGprUprCprUprGprU |
| ASO-362 | 383 | rCprUprCprUprCprUprCprUprCprUprCprUprCprUprCprUprCprUpsrGprU |
| ASO-363 | 384 | rCprUprCprUprCprUpsrGprUprCprUpsrGprUprCprUpsrGprUprCprUpsrGprU |
| ASO-364 | 385 | rCprUpsrGprUprCprUpsrGprUprCprUpsrGprUprCprUpsrGprUprCprUpsrGprU |
| ASO-365 | 386 | rCprUprCprUprCprUprAprUprCprUprAprUprCprUprAprUprCprUprAprU |
| ASO-366 | 387 | rCprUprAprUprCprUprAprUprCprUprAprUprCprUprAprUprCprUprAprU |
| ASO-380 | 401 | mGpsmCpsmApsmCpsmUpsrUprCprGprCprUprUprCprAprCprCpsrUpsm |
| | | CpsrUpslmGpsmC |
| ASO-382 | 403 | rUprGprCprAprCprUprUprCprGprCprUprUprCprAprCprCprUprCprUprG |
| ASO-383 | 404 | rUprUprCprGprCprUprUprCprAprCprCprUprCprUprGprCprAprCprGprU |
| ASO-425 | 446 | moeGpsmoe(5m)Cpsmoe(5m)Cpsmoe(5m)CpsmoeGpsmoeTpsmoe(5m)Cps |
| | | moeTpsmoeGpsmoeTpsmoeTpsmoeGpsmoeTpsmoeGpsmoeTpsmoeGpsmoe |
| | | Apsmoe(5m)CpsmoeTpsmoe(5m)C |
| ASO-426 | 447 | moe(5m)CpsmoeApsmoeGpsmoeApsr?moeGpsGpsTpsGpsApsApsGps(5m) |
| | | CpsGpsApsApsmoeGpsmoeTpsmoeGpsmoe(5m)CpsmoeA |
| ASO-427 | 448 | moe(5m)CpsmoeApsmoeGpsr?moeApsmoeGpsGpsTpsGpsApsApsGps(5m) |
| | | CpsGpsApsApsmoeGpsmoeTpsmoeGpsmoe(5m)CpsmoeA |
| ASO-428 | 449 | moe(5m)CpsmoeApsr?moeGpsmoeApsmoeGpsGpsTpsGpsApsApsGps(5m) |
| | | CpsGpsApsApsmoeGpsmoeTpsmoeGpsmoe(5m)CpsmoeA |
| ASO-429 | 450 | moe(5m)Cpsr?moeApsmoeGpsmoeApsmoeGpsGpsTpsGpsApsApsGps(5m) |
| | | CpsGpsApsApsmoeGpsmoeTpsmoeGpsmoe(5m)CpsmoeA |
| ASO-430 | 451 | moe(5m)Cpsr?moeApsmoeGpsmoeApsr?moeGpsGpsTpsGpsApsApsGps(5m) |
| | | CpsGpsApsApsmoeGpsmoeTpsmoeGpsmoe(5m)CpsmoeA |
| ASO-431 | 452 | moe(5m)Cpsr?moeApsmoeGpsr?moeApsmoeGpsGpsTpsGpsApsApsGps(5m) |
| | | CpsGpsApsApsmoeGpsmoeTpsmoeGpsmoe(5m)CpsmoeA |
| ASO-432 | 453 | moe(5m)CpsmoeApsr?moeGpsmoeApsr?moeGpsGpsTpsGpsApsApsGps(5m) |
| | | CpsGpsApsApsmoeGpsmoeTpsmoeGpsmoe(5m)CpsmoeA |
| ASO-433 | 454 | moe(5m)CpsmoeApsmoeGpsmoeApsmoeGpsGpsTpsGpsApsApsd(8nh)Gps |
| | | (5m)CpsGpsApsApsmoeGpsmoeTpsmoeGpsocp(5m)CpsmoeA |
| ASO-434 | 455 | moe(5m)CpsmoeApsmoeGpsmoeApsmoeGpsGpsTpsGpsApsApsd(8nh)Gps |
| | | (5m)CpsGpsApsApsmoeGpsocpTpsmoeGpsocp(5m)CpsmoeA |
| ASO-435 | 456 | ocp(5m)CpsmoeApsmoeGpsmoeApsmoeGpsGpsTpsGpsApsApsd(8nh)Gps |
| | | (5m)CpsGpsApsApsmoeGpsocpTpsmoeGpsmoe(5m)CpsmoeA |
| ASO-436 | 457 | ocp(5m)CpsmoeApsmoeGpsmoeApsmoeGpsGpsTpsGpsApsApsd(8nh)Gps |
| | | (5m)CpsGpsApsApsmoeGpsmoeTpsmoeGpsocp(5m)CpsmoeA |
| ASO-437 | 458 | moe(5m)CpsocpApsmoeGpsocpApsmoeGpsGpsTpsGpsApsApsd(8nh)Gps |
| | | (5m)CpsGpsApsApsmoeGpsmoeTpsmoeGpsmoe(5m)CpsmoeA |
| ASO-438 | 459 | moe(5m)CpsocpApsmoeGpsmoeApsmoeGpsGpsTpsGpsApsApsd(8nh)Gps |
| | | (5m)CpsGpsApsApsmoeGpsmoeTpsmoeGpsmoe(5m)CpsocpA |
| ASO-439 | 460 | moe(5m)CpsmoeApsmoeGpsocpApsmoeGpsGpsTpsGpsApsApsd(8nh)Gps |
| | | (5m)CpsGpsApsApsmoeGpsmoeTpsmoeGpsmoe(5m)CpsocpA |
| ASO-440 | 461 | moe(5m)CpsocpApsmoeGpsocpApsmoeGpsGpsTpsGpsApsApsd(8nh)Gps |
| | | (5m)CpsGpsApsApsmoeGpsmoeTpsmoeGpsmoe(5m)CpsocpA |
| ASO-441 | 462 | moe(5m)CpsmoeApsocpGpsmoeApsocpGpsGpsTpsGpsApsApsd(8nh)Gps |
| | | (5m)CpsGpsApsApsmoeGpsmoeTpsmoeGpsmoe(5m)CpsmoeA |
| ASO-442 | 463 | moe(5m)CpsmoeApsmoeGpsmoeApsmoeGpsGpsTpsGpsApsApsd(8nh)Gps |
| | | (5m)CpsGpsApsApsocpGpsmoeTpsocpGpsmoe(5m)CpsmoeA |
| ASO-443 | 464 | moe(5m)CpsmoeApsocpGpsmoeApsmoeGpsGpsTpsGpsApsApsd(8nh)Gps |
| | | (5m)CpsGpsApsApsocpGpsmoeTpsmoeGpsmoe(5m)CpsmoeA |
| ASO-444 | 465 | moe(5m)CpsmoeApsocpGpsmoeApsmoeGpsGpsTpsGpsApsApsd(8nh)Gps |
| | | (5m)CpsGpsApsApsmoeGpsmoeTpsocpGpsmoe(5m)CpsmoeA |
| ASO-445 | 466 | moe(5m)CpsmoeApsmoeGpsmoeApsocpGpsGpsTpsGpsApsApsd(8nh)Gps |
| | | (5m)CpsGpsApsApsocpGpsmoeTpsmoeGpsmoe(5m)CpsmoeA |
| ASO-446 | 467 | moe(5m)CpsmoeApsmoeGpsmoeApsocpGpsGpsTpsGpsApsApsd(8nh)Gps |
| | | (5m)CpsGpsApsApsmoeGpsmoeTpsocpGpsmoe(5m)CpsmoeA |
| ASO-447 | 468 | moe(5m)CpsmoeApsocpGpsmoeApsocpGpsGpsTpsGpsApsApsd(8nh)Gps |
| | | (5m)CpsGpsApsApsocpGpsmoeTpsmoeGpsmoe(5m)CpsmoeA |
| ASO-448 | 469 | moe(5m)CpsmoeApsocpGpsmoeApsocpGpsGpsTpsGpsApsApsd(8nh)Gps |
| | | (5m)CpsGpsApsApsmoeGpsmoeTpsocpGpsmoe(5m)CpsmoeA |
| ASO-449 | 470 | moe(5m)CpsmoeApsocpGpsmoeApsmoeGpsGpsTpsGpsApsApsd(8nh)Gps |
| | | (5m)CpsGpsApsApsocpGpsmoeTpsocpGpsmoe(5m)CpsmoeA |
| ASO-450 | 471 | moe(5m)CpsmoeApsmoeGpsmoeApsocpGpsGpsTpsGpsApsApsd(8nh)Gps |
| | | (5m)CpsGpsApsApsocpGpsmoeTpsocpGpsmoe(5m)CpsmoeA |
| ASO-451 | 472 | moe(5m)CpsocpApsocpGpsmoeApsocpGpsGpsTpsGpsApsApsd(8nh)Gps |
| | | (5m)CpsGpsApsApsmoeGpsmoeTpsmoeGpsmoe(5m)CpsmoeA |
| ASO-452 | 473 | moe(5m)CpsocpApsmoeGpsocpApsocpGpsGpsTpsGpsApsApsd(8nh)Gps |
| | | (5m)CpsGpsApsApsmoeGpsmoeTpsmoeGpsmoe(5m)CpsmoeA |
| ASO-453 | 474 | moe(5m)CpsmoeApsmoeGpsmoeApsmoeGpsGpsTpsGpsApsApsd(8nh)Gps |
| | | (5m)CpsGpsApsApsocpGpsmoeTpsocpGpsmoe(5m)CpsocpA |
| ASO-454 | 475 | moe(5m)CpsmoeApsmoeGpsmoeApsmoeGpsGpsTpsGpsApsApsd(8nh)Gps |
| | | (5m)CpsGpsApsApsocpGpsocpTpsmoeGpsmoe(5m)CpsocpA |
| ASO-455 | 476 | moe(5m)CpsmoeApsmoeGpsmoeApsmoeGpsGpsTpsGpsApsApsd(8nh)Gps |
| | | (5m)CpsGpsApsApsocpGpsmoeTpsmoeGpsocp(5m)CpsocpA |
| ASO-456 | 477 | moe(5m)CpsmoeApsmoeGpsmoeApsmoeGpsGpsTpsGpsApsApsd(8nh)Gps |
| | | (5m)CpsGpsApsApsocpGpsmoeTpsocpGpsocp(5m)CpsmoeA |
| ASO-457 | 478 | moe(5m)CpsmoeApsmoeGpsmoeApsmoeGpsGpsTpsGpsApsApsd(8nh)Gps |
| | | (5m)CpsGpsApsApsocpGpsmoeTpslnGpsmoe(5m)CpslnA |
| ASO-458 | 479 | moe(5m)CpsmoeApsmoeGpsmoeApsmoeGpsGpsTpsGpsApsApsd(8nh)Gps |
| | | (5m)CpsGpsApsApslnGpsmoeTpsocpGpsmoe(5m)CpslnA |
| ASO-459 | 480 | moe(5m)CpsmoeApsmoeGpsmoeApsmoeGpsGpsTpsGpsApsApsd(8nh)Gps |
| | | (5m)CpsGpsApsApslnGpsmoeTpslnGpsmoe(5m)CpsocpA |
| ASO-460 | 481 | moe(5m)CpsmoeApsmoeGpsmoeApsmoeGpsGpsTpsGpsApsApsd(8nh)Gps |
| | | (5m)CpsGpsApsApsocpGpsmoeTpsocpGpsmoe(5m)CpslnA |
| ASO-461 | 482 | moe(5m)CpsmoeApsmoeGpsmoeApsmoeGpsGpsTpsGpsApsApsd(8nh)Gps |
| | | (5m)CpsGpsApsApslnGpsmoeTpsocpGpsmoe(5m)CpsocpA |
| ASO-462 | 483 | moe(5m)CpsmoeApsmoeGpsmoeApsmoeGpsGpsTpsGpsApsApsd(8nh)Gps |
| | | (5m)CpsGpsApsApsocpGpsmoeTpslnGpsmoe(5m)CpsocpA |
| ASO-463 | 484 | moe(5m)CpsmoeApsmoeGpsmoeApsmoeGpsGpsTpsGpsApsApsGps(5m)Cps |
| | | GpsApsApsmoeGpss?moeTpsmoeGpsmoe(5m)CpsmoeA |
| ASO-464 | 485 | moe(5m)CpsmoeApsmoeGpsmoeApsmoeGpsGpsTpsGpsApsApsGps(5m)Cps |
| | | GpsApsApsmoeGpsmoeTpss?moeGpsmoe(5m)CpsmoeA |
| ASO-465 | 486 | moe(5m)CpsmoeApsmoeGpsmoeApsmoeGpsGpsTpsGpsApsApsGps(5m)Cps |
| | | GpsApsApsmoeGpsmoeTpsmoeGpss?moe(5m)CpsmoeA |
| ASO-466 | 487 | moe(5m)CpsmoeApsmoeGpsmoeApsmoeGpsGpsTpsGpsApsApsGps(5m)Cps |
| | | GpsApsApsmoeGpsmoeTpsmoeGpsmoe(5m)Cpss?moeA |
| ASO-467 | 488 | moe(5m)CpsmoeApsmoeGpsmoeApsmoeGpsGpsTpsGpsApsApsGps(5m)Cps |
| | | GpsApsApsmoeGpsr?moeTpsmoeGpsmoe(5m)CpsmoeA |
| ASO-468 | 489 | moe(5m)CpsmoeApsmoeGpsmoeApsmoeGpsGpsTpsGpsApsApsGps(5m)Cps |
| | | GpsApsApsmoeGpsmoeTpsr?moeGpsmoe(5m)CpsmoeA |
| ASO-469 | 490 | moe(5m)CpsmoeApsmoeGpsmoeApsmoeGpsGpsTpsGpsApsApsGps(5m)Cps |
| | | GpsApsApsmoeGpsmoeTpsmoeGpsr?moe(5m)CpsmoeA |
| ASO-470 | 491 | ln(5m)CpsmoeApsmoeGpsmoeApsmoeGpsomcpGpsTpsGpsApsApsGps(5m) |
| | | CpsGpsApsApsmoeGpslnTpsmoeGpsmoe(5m)CpsmoeA |
| ASO-471 | 492 | ln(5m)CpsmoeApsmoeGpsmoeApsmoeGpsGpsTpsomcpGpsApsApsGps(5m) |
| | | CpsGpsApsApsmoeGpslnTpsmoeGpsmoe(5m)CpsmoeA |
| ASO-472 | 493 | ln(5m)CpsmoeApsmoeGpsmoeApsmoeGpsomcpGpsTpsomcpGpsApsApsGps |
| | | (5m)CpsGpsApsApsmoeGpslnTpsmoeGpsmoe(5m)CpsmoeA |
| ASO-473 | 494 | moe(5m)CpslnApsmoeGpslnApsmoeGpsomcpGpsTpsGpsApsApsGps(5m)Cps |
| | | GpsApsApsmoeGpsmoeTpsmoeGpsmoe(5m)CpsmoeA |
| ASO-474 | 495 | moe(5m)CpslnApsmoeGpslnApsmoeGpsGpsTpsomcpGpsApsApsGps(5m)Cps |
| | | GpsApsApsmoeGpsmoeTpsmoeGpsmoe(5m)CpsmoeA |
| ASO-475 | 496 | moe(5m)CpslnApsmoeGpslnApsmoeGpsomcpGpsTpsomcpGpsApsApsGps |
| | | (5m)CpsGpsApsApsmoeGpsmoeTpsmoeGpsmoe(5m)CpsmoeA |
| ASO-476 | 497 | moe(5m)CpsmoeApslnGpsmoeApsmoeGpsomcpGpsTpsGpsApsApsGps(5m) |
| | | CpsGpsApsApsmoeGpsmoeTpslnGpsmoe(5m)CpsmoeA |
| ASO-477 | 498 | moe(5m)CpsmoeApslnGpsmoeApsmoeGpsGpsTpsomcpGpsApsApsGps(5m) |
| | | CpsGpsApsApsmoeGpsmoeTpslnGpsmoe(5m)CpsmoeA |
| ASO-478 | 499 | moe(5m)CpsmoeApslnGpsmoeApsmoeGpsomcpGpsTpsomcpGpsApsApsGps |
| | | (5m)CpsGpsApsApsmoeGpsmoeTpslnGpsmoe(5m)CpsmoeA |
| ASO-479 | 500 | moe(5m)CpsmoeApsmoeGpsmoeApsmoeGpsGpsTpsGpsApsApsGps(5m)Cps |
| | | GpsApsApsmoeGpsmoeTpsmoeGpsocp(5m)CpsmoeA |
| ASO-480 | 501 | moe(5m)CpsmoeApsmoeGpsmoeApsmoeGpsGpsTpsGpsApsApsGps(5m)Cps |
| | | GpsApsApsmoeGpsocpTpsmoeGpsocp(5m)CpsmoeA |
| ASO-481 | 502 | ocp(5m)CpsmoeApsmoeGpsmoeApsmoeGpsGpsTpsGpsApsApsGps(5m)Cps |
| | | GpsApsApsmoeGpsocpTpsmoeGpsmoe(5m)CpsmoeA |
| ASO-482 | 503 | ocp(5m)CpsmoeApsmoeGpsmoeApsmoeGpsGpsTpsGpsApsApsGps(5m)Cps |
| | | GpsApsApsmoeGpsmoeTpsmoeGpsocp(5m)CpsmoeA |
| ASO-483 | 504 | moe(5m)CpsocpApsmoeGpsocpApsmoeGpsGpsTpsGpsApsApsGps(5m)Cps |
| | | GpsApsApsmoeGpsmoeTpsmoeGpsmoe(5m)CpsmoeA |
| ASO-484 | 505 | moe(5m)CpsocpApsmoeGpsmoeApsmoeGpsGpsTpsGpsApsApsGps(5m)Cps |
| | | GpsApsApsmoeGpsmoeTpsmoeGpsmoe(5m)CpsocpA |
| ASO-485 | 506 | moe(5m)CpsmoeApsmoeGpsocpApsmoeGpsGpsTpsGpsApsApsGps(5m)Cps |
| | | GpsApsApsmoeGpsmoeTpsmoeGpsmoe(5m)CpsocpA |
| ASO-486 | 507 | moe(5m)CpsmoeApsocpGpsmoeApsocpGpsGpsTpsGpsApsApsGps(5m)Cps |
| | | GpsApsApsmoeGpsmoeTpsmoeGpsmoe(5m)CpsmoeA |
| ASO-487 | 508 | moe(5m)CpsmoeApsmoeGpsmoeApsmoeGpsGpsTpsGpsApsApsGps(5m)Cps |
| | | GpsApsApsocpGpsmoeTpsocpGpsmoe(5m)CpsmoeA |
| ASO-488 | 509 | moe(5m)CpsmoeApsocpGpsmoeApsmoeGpsGpsTpsGpsApsApsGps(5m)Cps |
| | | GpsApsApsocpGpsmoeTpsmoeGpsmoe(5m)CpsmoeA |
| ASO-489 | 510 | moe(5m)CpsmoeApsocpGpsmoeApsmoeGpsGpsTpsGpsApsApsGps(5m)Cps |
| | | GpsApsApsmoeGpsmoeTpsocpGpsmoe(5m)CpsmoeA |
| ASO-490 | 511 | moe(5m)CpsmoeApsmoeGpsmoeApsocpGpsGpsTpsGpsApsApsGps(5m)Cps |
| | | GpsApsApsocpGpsmoeTpsmoeGpsmoe(5m)CpsmoeA |
| ASO-491 | 512 | moe(5m)CpsmoeApsmoeGpsmoeApsocpGpsGpsTpsGpsApsApsGps(5m)Cps |
| | | GpsApsApsmoeGpsmoeTpsocpGpsmoe(5m)CpsmoeA |
| ASO-492 | 513 | moe(5m)CpsocpApsocpGpsmoeApsocpGpsGpsTpsGpsApsApsGps(5m)Cps |
| | | GpsApsApsmoeGpsmoeTpsmoeGpsmoe(5m)CpsmoeA |
| ASO-493 | 514 | moe(5m)CpsocpApsmoeGpsocpApsocpGpsGpsTpsGpsApsApsGps(5m)Cps |
| | | GpsApsApsmoeGpsmoeTpsmoeGpsmoe(5m)CpsmoeA |
| ASO-494 | 515 | moe(5m)CpsmoeApsmoeGpsmoeApsmoeGpsGpsTpsGpsApsApsGps(5m)Cps |
| | | GpsApsApsocpGpsmoeTpsocpGpsmoe(5m)CpsocpA |
| ASO-495 | 516 | moe(5m)CpsmoeApsmoeGpsmoeApsmoeGpsGpsTpsGpsApsApsGps(5m)Cps |
| | | GpsApsApsocpGpsocpTpsmoeGpsmoe(5m)CpsocpA |
| ASO-496 | 517 | moe(5m)CpsmoeApsmoeGpsmoeApsmoeGpsGpsTpsGpsApsApsGps(5m)Cps |
| | | GpsApsApsocpGpsmoeTpsmoeGpsocp(5m)CpsocpA |
| ASO-497 | 518 | moe(5m)CpsmoeApsmoeGpsmoeApsmoeGpsGpsTpsGpsApsApsGps(5m)Cps |
| | | GpsApsApsocpGpsmoeTpsocpGpsocp(5m)CpsmoeA |
| ASO-498 | 519 | moe(5m)CpsocpApsmoeGpsocpApsmoeGpsGpsTpsGpsApsApsGps(5m)Cps |
| | | GpsApsApsmoeGpsmoeTpsmoeGpsmoe(5m)CpsocpA |
| ASO-499 | 520 | moe(5m)CpsmoeApsocpGpsmoeApsocpGpsGpsTpsGpsApsApsGps(5m)Cps |
| | | GpsApsApsocpGpsmoeTpsmoeGpsmoe(5m)CpsmoeA |
| ASO-500 | 521 | moe(5m)CpsmoeApsocpGpsmoeApsocpGpsGpsTpsGpsApsApsGps(5m)Cps |
| | | GpsApsApsmoeGpsmoeTpsocpGpsmoe(5m)CpsmoeA |
| ASO-501 | 522 | moe(5m)CpsmoeApsocpGpsmoeApsmoeGpsGpsTpsGpsApsApsGps(5m)Cps |
| | | GpsApsApsocpGpsmoeTpsocpGpsmoe(5m)CpsmoeA |
| ASO-502 | 523 | moe(5m)CpsmoeApsmoeGpsmoeApsocpGpsGpsTpsGpsApsApsGps(5m)Cps |
| | | GpsApsApsocpGpsmoeTpsocpGpsmoe(5m)CpsmoeA |
| ASO-503 | 524 | moe(5m)CpsmoeApsmoeGpsmoeApsmoeGpsGpsTpsGpsApsApsGps(5m)Cps |
| | | GpsApsApsocpGpsmoeTpslnGpsmoe(5m)CpslnA |
| ASO-504 | 525 | moe(5m)CpsmoeApsmoeGpsmoeApsmoeGpsGpsTpsGpsApsApsGps(5m)Cps |
| | | GpsApsApslnGpsmoeTpsocpGpsmoe(5m)CpslnA |
| ASO-505 | 526 | moe(5m)CpsmoeApsmoeGpsmoeApsmoeGpsGpsTpsGpsApsApsGps(5m)Cps |
| | | GpsApsApslnGpsmoeTpslnGpsmoe(5m)CpsocpA |
| ASO-506 | 527 | moe(5m)CpsmoeApsmoeGpsmoeApsmoeGpsGpsTpsGpsApsApsGps(5m)Cps |
| | | GpsApsApsocpGpsmoeTpsocpGpsmoe(5m)CpslnA |
| ASO-507 | 528 | moe(5m)CpsmoeApsmoeGpsmoeApsmoeGpsGpsTpsGpsApsApsGps(5m)Cps |
| | | GpsApsApslnGpsmoeTpsocpGpsmoe(5m)CpsocpA |
| ASO-508 | 529 | moe(5m)CpsmoeApsmoeGpsmoeApsmoeGpsGpsTpsGpsApsApsGps(5m)Cps |
| | | GpsApsApsocpGpsmoeTpslnGpsmoe(5m)CpsocpA |
| ASO-509 | 530 | moeApsmoeGpsmoeGpslnTpsmoeGpsApsApsGps(5m)CpsGpsApsApsGpsTps |
| | | Gpsln(5m)CpsmoeApsmoe(5m)CpsmoeApsmoe(5m)C |
| ASO-510 | 531 | moeApsmoeGpsmoeGpslnTpsmoeGpsApsApsGps(5m)CpsGpsApsApsGpsTps |
| | | Gpsmoe(5m)CpsmoeApsln(5m)CpsmoeApsmoe(5m)C |
| ASO-511 | 532 | moeApsmoeGpsmoeGpslnTpsmoeGpsApsApsGps(5m)CpsGpsApsApsGpsTps |
| | | Gpsmoe(5m)CpsmoeApsmoe(5m)CpsmoeApsln(5m)C |
| ASO-512 | 533 | moeApsmoeGpsmoeGpsmoeTpsmoeGpsApsApsGps(5m)CpsGpsApsApsGps |
| | | TpsGpsln(5m)CpsmoeApsln(5m)CpsmoeApsmoe(5m)C |
| ASO-513 | 534 | moeApsmoeGpsmoeGpsmoeTpsmoeGpsApsApsGps(5m)CpsGpsApsApsGps |
| | | TpsGpsln(5m)CpsmoeApsmoe(5m)CpsmoeApsln(5m)C |
| ASO-514 | 535 | moeApsmoeGpsmoeGpsmoeTpsmoeGpsApsApsGps(5m)CpsGpsApsApsGps |
| | | TpsGpsmoe(5m)CpsmoeApsln(5m)CpsmoeApsln(5m)C |
| ASO-515 | 536 | lnApsmoeGpsmoeGpsmoeTpsmoeGpsApsApsGps(5m)CpsGpsApsApsGpsTps |
| | | Gpsmoe(5m)CpslnApsmoe(5m)CpsmoeApsmoe(5m)C |
| ASO-516 | 537 | lnApsmoeGpsmoeGpsmoeTpsmoeGpsApsApsGps(5m)CpsGpsApsApsGpsTps |
| | | Gpsmoe(5m)CpsmoeApsmoe(5m)CpslnApsmoe(5m)C |
| ASO-517 | 538 | moeApslnGpslnGpsmoeTpsmoeGpsApsApsGps(5m)CpsGpsApsApsGpsTps |
| | | Gpsmoe(5m)CpsmoeApsmoe(5m)CpsmoeApsmoe(5m)C |
| ASO-518 | 539 | moeApslnGpsmoeGpsmoeTpslnGpsApsApsGps(5m)CpsGpsApsApsGpsTps |
| | | Gpsmoe(5m)CpsmoeApsmoe(5m)CpsmoeApsmoe(5m)C |
| ASO-519 | 540 | moeApsmoeGpslnGpsmoeTpslnGpsApsApsGps(5m)CpsGpsApsApsGpsTps |
| | | Gpsmoe(5m)CpsmoeApsmoe(5m)CpsmoeApsmoe(5m)C |
| ASO-520 | 541 | lnApslnGpslnGpsmoeTpsmoeGpsApsApsGps(5m)CpsGpsApsApsGpsTpsGps |
| | | moe(5m)CpsmoeApsmoe(5m)CpsmoeApsmoe(5m)C |
| ASO-521 | 542 | lnApslnGpsmoeGpsmoeTpslnGpsApsApsGps(5m)CpsGpsApsApsGpsTpsGps |
| | | moe(5m)CpsmoeApsmoe(5m)CpsmoeApsmoe(5m)C |
| ASO-522 | 543 | moeApslnGpslnGpsmoeTpslnGpsApsApsGps(5m)CpsGpsApsApsGpsTpsGps |
| | | moe(5m)CpsmoeApsmoe(5m)CpsmoeApsmoe(5m)C |
| ASO-523 | 544 | lnApsmoeGpslnGpsmoeTpslnGpsApsApsGps(5m)CpsGpsApsApsGpsTpsGps |
| | | moe(5m)CpsmoeApsmoe(5m)CpsmoeApsmoe(5m)C |
| ASO-524 | 545 | moeApsmoeGpsmoeGpsmoeTpsmoeGpsApsApsGps(5m)CpsGpsApsApsGps |
| | | TpsGpsln(5m)CpslnApsmoe(5m)CpslnApsmoe(5m)C |
| ASO-525 | 546 | moeApsmoeGpsmoeGpsmoeTpsmoeGpsApsApsGps(5m)CpsGpsApsApsGps |
| | | TpsGpsln(5m)CpslnApsmoe(5m)CpsmoeApsln(5m)C |
| ASO-526 | 547 | moeApsmoeGpsmoeGpsmoeTpsmoeGpsApsApsGps(5m)CpsGpsApsApsGps |
| | | TpsGpsln(5m)CpsmoeApsln(5m)CpslnApsmoe(5m)C |
| ASO-527 | 548 | moeApsmoeGpsmoeGpsmoeTpsmoeGpsApsApsGps(5m)CpsGpsApsApsGps |
| | | TpsGpsln(5m)CpsmoeApsln(5m)CpsmoeApsln(5m)C |
| ASO-528 | 549 | moeApsmoeGpsmoeGpsmoeTpsmoeGpsApsApsGps(5m)CpsGpsApsApsGps |
| | | TpsGpsmoe(5m)CpslnApsln(5m)CpsmoeApsln(5m)C |
| ASO-529 | 550 | lnApsmoeGpsmoeGpsmoeTpsmoeGpsApsApsGps(5m)CpsGpsApsApsGpsTps |
| | | Gpsmoe(5m)CpslnApsmoe(5m)CpslnApsmoe(5m)C |
| ASO-530 | 551 | moeApsmoeGpsmoeGpslnTpsmoeGpsApsApsGps(5m)CpsGpsApsApsGpsTps |
| | | Gpsln(5m)CpsmoeApsln(5m)CpsmoeApsmoe(5m)C |
| ASO-531 | 552 | moeApsmoeGpsmoeGpslnTpsmoeGpsApsApsGps(5m)CpsGpsApsApsGpsTps |
| | | Gpsln(5m)CpsmoeApsmoe(5m)CpsmoeApsln(5m)C |
| ASO-532 | 553 | moeApsmoeGpsmoeGpslnTpsmoeGpsApsApsGps(5m)CpsGpsApsApsGpsTps |
| | | Gpsmoe(5m)CpsmoeApsln(5m)CpsmoeApsln(5m)C |
| ASO-533 | 554 | moeApsmoeGpsmoeGpsmoeTpslnGpsApsApsGps(5m)CpsGpsApsApsGpsTps |
| | | Gpsln(5m)CpsmoeApsln(5m)CpsmoeApsmoe(5m)C |
| ASO-534 | 555 | moeApsmoeGpsmoeGpsmoeTpslnGpsApsApsGps(5m)CpsGpsApsApsGpsTps |
| | | Gpsln(5m)CpsmoeApsmoe(5m)CpsmoeApsln(5m)C |
| ASO-535 | 556 | moeApsmoeGpsmoeGpsmoeTpslnGpsApsApsGps(5m)CpsGpsApsApsGpsTps |
| | | Gpsmoe(5m)CpsmoeApsln(5m)CpsmoeApsln(5m)C |
| ASO-536 | 557 | ln(5m)CpsmoeApsmoeGpsmoeApsmoeGpsd(8nh)GpsTpsGpsApsApsGps(5m) |
| | | CpsGpsApsApsmoeGpslnTpsmoeGpsmoe(5m)CpsmoeA |
| ASO-537 | 558 | ln(5m)CpsmoeApsmoeGpsmoeApsmoeGpsGpsd(2s)TpsGpsApsApsGps(5m) |
| | | CpsGpsApsApsmoeGpslnTpsmoeGpsmoe(5m)CpsmoeA |
| ASO-538 | 559 | ln(5m)CpsmoeApsmoeGpsmoeApsmoeGpsGpsTpsd(8nh)GpsApsApsGps |
| | | (5m)CpsGpsApsApsmoeGpslnTpsmoeGpsmoe(5m)CpsmoeA |
| ASO-539 | 560 | ln(5m)CpsmoeApsmoeGpsmoeApsmoeGpsGpsTpsGpsd(8nh)ApsApsGps |
| | | (5m)CpsGpsApsApsmoeGpslnTpsmoeGpsmoe(5m)CpsmoeA |
| ASO-540 | 561 | ln(5m)CpsmoeApsmoeGpsmoeApsmoeGpsGpsTpsGpsApsd(8nh)ApsGps |
| | | (5m)CpsGpsApsApsmoeGpslnTpsmoeGpsmoe(5m)CpsmoeA |
| ASO-541 | 562 | ln(5m)CpsmoeApsmoeGpsmoeApsmoeGpsGpsTpsGpsApsApsGpsd(5oh)Cps |
| | | GpsApsApsmoeGpslnTpsmoeGpsmoe(5m)CpsmoeA |
| ASO-542 | 563 | ln(5m)CpsmoeApsmoeGpsmoeApsmoeGpsGpsTpsGpsApsApsGps(5m)Cpsd |
| | | (8nh)GpsApsApsmoeGpslnTpsmoeGpsmoe(5m)CpsmoeA |
| ASO-543 | 564 | ln(5m)CpsmoeApsmoeGpsmoeApsmoeGpsGpsTpsGpsApsApsGps(5m)Cps |
| | | Gpsd(8nh)ApsApsmoeGpslnTpsmoeGpsmoe(5m)CpsmoeA |
| ASO-544 | 565 | ln(5m)CpsmoeApsmoeGpsmoeApsmoeGpsGpsTpsGpsApsApsGps(5m)Cps |
| | | GpsApsd(8nh)ApsmoeGpslnTpsmoeGpsmoe(5m)CpsmoeA |
| ASO-545 | 566 | ln(5m)CpslnApsmoeGpsmoeApsmoeGpsGpsTpsGpsApsApsGps(5m)CpsGps |
| | | ApsApsmoeGpsmoeTpsmoeGpsmoe(5m)CpsmoeA |
| ASO-546 | 567 | ln(5m)CpsmoeApslnGpsmoeApsmoeGpsGpsTpsGpsApsApsGps(5m)CpsGps |
| | | ApsApsmoeGpsmoeTpsmoeGpsmoe(5m)CpsmoeA |
| ASO-547 | 568 | ln(5m)CpsmoeApsmoeGpslnApsmoeGpsGpsTpsGpsApsApsGps(5m)CpsGps |
| | | ApsApsmoeGpsmoeTpsmoeGpsmoe(5m)CpsmoeA |
| ASO-548 | 569 | ln(5m)CpsmoeApsmoeGpsmoeApslnGpsGpsTpsGpsApsApsGps(5m)CpsGps |
| | | ApsApsmoeGpsmoeTpsmoeGpsmoe(5m)CpsmoeA |
| ASO-549 | 570 | ln(5m)CpsmoeApsmoeGpsmoeApsmoeGpsGpsTpsGpsApsApsGps(5m)Cps |
| | | GpsApsApslnGpsmoeTpsmoeGpsmoe(5m)CpsmoeA |
| ASO-550 | 571 | ln(5m)CpsmoeApsmoeGpsmoeApsmoeGpsGpsTpsGpsApsApsGps(5m)Cps |
| | | GpsApsApsmoeGpsmoeTpslnGpsmoe(5m)CpsmoeA |
| ASO-551 | 572 | ln(5m)CpsmoeApsmoeGpsmoeApsmoeGpsGpsTpsGpsApsApsGps(5m)Cps |
| | | GpsApsApsmoeGpsmoeTpsmoeGpsmoe(5m)CpslnA |
| ASO-552 | 573 | moe(5m)CpslnApslnGpsmoeApsmoeGpsGpsTpsGpsApsApsGps(5m)CpsGps |
| | | ApsApsmoeGpsmoeTpsmoeGpsmoe(5m)CpsmoeA |
| ASO-553 | 574 | moe(5m)CpslnApsmoeGpsmoeApslnGpsGpsTpsGpsApsApsGps(5m)CpsGps |
| | | ApsApsmoeGpsmoeTpsmoeGpsmoe(5m)CpsmoeA |
| ASO-554 | 575 | moe(5m)CpslnApsmoeGpsmoeApsmoeGpsGpsTpsGpsApsApsGps(5m)Cps |
| | | GpsApsApslnGpsmoeTpsmoeGpsmoe(5m)CpsmoeA |
| ASO-555 | 576 | moe(5m)CpslnApsmoeGpsmoeApsmoeGpsGpsTpsGpsApsApsGps(5m)Cps |
| | | GpsApsApsmoeGpslnTpsmoeGpsmoe(5m)CpsmoeA |
| ASO-556 | 577 | moe(5m)CpslnApsmoeGpsmoeApsmoeGpsGpsTpsGpsApsApsGps(5m)Cps |
| | | GpsApsApsmoeGpsmoeTpslnGpsmoe(5m)CpsmoeA |
| ASO-557 | 578 | moe(5m)CpslnApsmoeGpsmoeApsmoeGpsGpsTpsGpsApsApsGps(5m)Cps |
| | | GpsApsApsmoeGpsmoeTpsmoeGpsln(5m)CpsmoeA |
| ASO-558 | 579 | moe(5m)CpsmoeApslnGpslnApsmoeGpsGpsTpsGpsApsApsGps(5m)CpsGps |
| | | ApsApsmoeGpsmoeTpsmoeGpsmoe(5m)CpsmoeA |
| ASO-559 | 580 | moe(5m)CpsmoeApslnGpsmoeApsmoeGpsGpsTpsGpsApsApsGps(5m)Cps |
| | | GpsApsApsmoeGpslnTpsmoeGpsmoe(5m)CpsmoeA |
| ASO-560 | 581 | moe(5m)CpsmoeApslnGpsmoeApsmoeGpsGpsTpsGpsApsApsGps(5m)Cps |
| | | GpsApsApsmoeGpsmoeTpsmoeGpsln(5m)CpsmoeA |
| ASO-561 | 582 | moe(5m)CpsmoeApslnGpsmoeApsmoeGpsGpsTpsGpsApsApsGps(5m)Cps |
| | | GpsApsApsmoeGpsmoeTpsmoeGpsmoe(5m)CpslnA |
| ASO-562 | 583 | moe(5m)CpsmoeApsmoeGpslnApslnGpsGpsTpsGpsApsApsGps(5m)CpsGps |
| | | ApsApsmoeGpsmoeTpsmoeGpsmoe(5m)CpsmoeA |
| ASO-563 | 584 | moe(5m)CpsmoeApsmoeGpslnApsmoeGpsGpsTpsGpsApsApsGps(5m)Cps |
| | | GpsApsApslnGpsmoeTpsmoeGpsmoe(5m)CpsmoeA |
| ASO-564 | 585 | moe(5m)CpsmoeApsmoeGpslnApsmoeGpsGpsTpsGpsApsApsGps(5m)Cps |
| | | GpsApsApsmoeGpslnTpsmoeGpsmoe(5m)CpsmoeA |
| ASO-565 | 586 | moe(5m)CpsmoeApsmoeGpslnApsmoeGpsGpsTpsGpsApsApsGps(5m)Cps |
| | | GpsApsApsmoeGpsmoeTpslnGpsmoe(5m)CpsmoeA |
| ASO-566 | 587 | moe(5m)CpsmoeApsmoeGpslnApsmoeGpsGpsTpsGpsApsApsGps(5m)Cps |
| | | GpsApsApsmoeGpsmoeTpsmoeGpsln(5m)CpsmoeA |
| ASO-567 | 588 | moe(5m)CpsmoeApsmoeGpsmoeApslnGpsGpsTpsGpsApsApsGps(5m)Cps |
| | | GpsApsApsmoeGpslnTpsmoeGpsmoe(5m)CpsmoeA |
| ASO-568 | 589 | moe(5m)CpsmoeApsmoeGpsmoeApslnGpsGpsTpsGpsApsApsGps(5m)Cps |
| | | GpsApsApsmoeGpsmoeTpsmoeGpsln(5m)CpsmoeA |
| ASO-569 | 590 | moe(5m)CpsmoeApsmoeGpsmoeApslnGpsGpsTpsGpsApsApsGps(5m)Cps |
| | | GpsApsApsmoeGpsmoeTpsmoeGpsmoe(5m)CpslnA |
| ASO-570 | 591 | moe(5m)CpsmoeApsmoeGpsmoeApsmoeGpsGpsTpsGpsApsApsGps(5m)Cps |
| | | GpsApsApslnGpslnTpsmoeGpsmoe(5m)CpsmoeA |
| ASO-571 | 592 | moe(5m)CpsmoeApsmoeGpsmoeApsmoeGpsGpsTpsGpsApsApsGps(5m)Cps |
| | | GpsApsApslnGpsmoeTpsmoeGpsln(5m)CpsmoeA |
| ASO-572 | 593 | moe(5m)CpsmoeApsmoeGpsmoeApsmoeGpsGpsTpsGpsApsApsGps(5m)Cps |
| | | GpsApsApslnGpsmoeTpsmoeGpsmoe(5m)CpslnA |
| ASO-573 | 594 | moe(5m)CpsmoeApsmoeGpsmoeApsmoeGpsGpsTpsGpsApsApsGps(5m)Cps |
| | | GpsApsApsmoeGpslnTpslnGpsmoe(5m)CpsmoeA |
| ASO-574 | 595 | moe(5m)CpsmoeApsmoeGpsmoeApsmoeGpsGpsTpsGpsApsApsGps(5m)Cps |
| | | GpsApsApsmoeGpslnTpsmoeGpsln(5m)CpsmoeA |
| ASO-575 | 596 | moe(5m)CpsmoeApsmoeGpsmoeApsmoeGpsGpsTpsGpsApsApsGps(5m)Cps |
| | | GpsApsApsmoeGpslnTpsmoeGpsmoe(5m)CpslnA |
| ASO-576 | 597 | moe(5m)CpsmoeApsmoeGpsmoeApsmoeGpsGpsTpsGpsApsApsGps(5m)Cps |
| | | GpsApsApsmoeGpsmoeTpslnGpsln(5m)CpsmoeA |
| ASO-577 | 598 | moe(5m)CpsmoeApsmoeGpsmoeApsmoeGpsGpsTpsGpsApsApsGps(5m)Cps |
| | | GpsApsApsmoeGpsmoeTpslnGpsmoe(5m)CpslnA |
| ASO-578 | 599 | moe(5m)CpsmoeApsmoeGpsmoeApsmoeGpsGpsTpsGpsApsApsGps(5m)Cps |
| | | GpsApsApsmoeGpsmoeTpsmoeGpsln(5m)CpslnA |
| ASO-579 | 600 | moe(5m)CpsmoeApsmoeGpsmoeApsmoeGpsGypTpsGpsApsApsGps(5m)Cps |
| | | GpsApsApsmoeGpsmoeTpsmoeGpsmoe(5m)CpsmoeA |
| ASO-580 | 601 | moe(5m)CpsmoeApsmoeGpsmoeApsmoeGypdGypTpsGpsApsApsGps(5m) |
| | | CpsGpsApsApsmoeGpsmoeTpsmoeGpsmoe(5m)CpsmoeA |
| ASO-581 | 602 | moe(5m)CpsmoeApsmoeGpsmoeApsmoeGpsGypdTypGpsApsApsGps(5m) |
| | | CpsGpsApsApsmoeGpsmoeTpsmoeGpsmoe(5m)CpsmoeA |
| ASO-582 | 603 | moe(5m)CpsmoeApsmoeGpsmoeApsmoeGpsGpsTypdGypApsApsGps(5m) |
| | | CpsGpsApsApsmoeGpsmoeTpsmoeGpsmoe(5m)CpsmoeA |
| ASO-583 | 604 | moe(5m)CpsmoeApsmoeGpsmoeApsmoeGpsGpsTpsGypdAypApsGps(5m) |
| | | CpsGpsApsApsmoeGpsmoeTpsmoeGpsmoe(5m)CpsmoeA |
| ASO-584 | 605 | moe(5m)CpsmoeApsmoeGpsmoeApsmoeGpsGpsTpsGpsAypdAypGps(5m) |
| | | CpsGpsApsApsmoeGpsmoeTpsmoeGpsmoe(5m)CpsmoeA |
| ASO-585 | 606 | moe(5m)CpsmoeApsmoeGpsmoeApsmoeGpsGpsTpsGpsApsAypdGyp(5m) |
| | | CpsGpsApsApsmoeGpsmoeTpsmoeGpsmoe(5m)CpsmoeA |
| ASO-586 | 607 | moe(5m)CpsmoeApsmoeGpsmoeApsmoeGpsGpsTpsGpsApsApsGypd(5m) |
| | | CypGpsApsApsmoeGpsmoeTpsmoeGpsmoe(5m)CpsmoeA |
| ASO-587 | 608 | moe(5m)CpsmoeApsmoeGpsmoeApsmoeGpsGpsTpsGpsApsApsGps(5m)Cypd |
| | | GypApsApsmoeGpsmoeTpsmoeGpsmoe(5m)CpsmoeA |
| ASO-588 | 609 | moe(5m)CpsmoeApsmoeGpsmoeApsmoeGpsGpsTpsGpsApsApsGps(5m)Cps |
| | | GypdAypApsmoeGpsmoeTpsmoeGpsmoe(5m)CpsmoeA |
| ASO-589 | 610 | moe(5m)CpsmoeApsmoeGpsmoeApsmoeGpsGpsTpsGpsApsApsGps(5m)Cps |
| | | GpsAypdAypmoeGpsmoeTpsmoeGpsmoe(5m)CpsmoeA |
| ASO-590 | 611 | moeApsmoeGpsmoeGpsmoeTpsmoeGpsApsApsGps(5m)CpsGpsApsApsGps |
| | | TpsGps(5m)CpsmoeApsmoe(5m)CpsmoeApsmoe(5m)CpsmoeG |
| ASO-591 | 612 | moeApsmoeGpsmoeGpsmoeTpsGpsApsApsGps(5m)CpsGpsApsApsGpsTps |
| | | moeGpsmoe(5m)CpsmoeApsmoe(5m)CpsmoeApsmoe(5m)CpsmoeG |
| ASO-592 | 613 | moeApsmoeGpsmoeGpsmoeTpsmoeGpsApsApsGps(5m)CpsGpsApsApsGps |
| | | TpsGpsmoe(5m)CpsmoeApsmoe(5m)CpsmoeApsmoe(5m)CpsmoeG |
| ASO-593 | 614 | moeApsmoeGpsmoeGpsmoeTpsmoeGpsmoeApsApsGps(5m)CpsGpsApsAps |
| | | GpsTpsGps(5m)CpsmoeApsmoe(5m)CpsmoeApsmoe(5m)CpsmoeG |
| ASO-594 | 615 | moeApsmoeGpsmoeGpsmoeTpsmoeGpsmoeApsmoeApsGps(5m)CpsGpsAps |
| | | ApsGpsTpsGps(5m)CpsApsmoe(5m)CpsmoeApsmoe(5m)CpsmoeG |
| ASO-595 | 616 | moeApsmoeGpsmoeGpsmoeTpsGpsApsApsGps(5m)CpsGpsApsApsGpsmoe |
| | | TpsmoeGpsmoe(5m)CpsmoeApsmoe(5m)CpsmoeApsmoe(5m)CpsmoeG |
| ASO-596 | 617 | moeApsmoeGpsmoeGpsmoeTpsmoeGpsApsApsGps(5m)CpsGpsApsApsGps |
| | | TpsmoeGpsmoe(5m)CpsmoeApsmoe(5m)CpsmoeApsmoe(5m)CpsmoeG |
| ASO-597 | 618 | moeApsmoeGpsmoeGpsmoeTpsmoeGpsmoeApsApsGps(5m)CpsGpsApsAps |
| | | GpsTpsGpsmoe(5m)CpsmoeApsmoe(5m)CpsmoeApsmoe(5m)CpsmoeG |
| ASO-598 | 619 | moeApsmoeGpsmoeGpsmoeTpsmoeGpsmoeApsmoeApsGps(5m)CpsGpsAps |
| | | ApsGpsTpsGps(5m)CpsmoeApsmoe(5m)CpsmoeApsmoe(5m)CpsmoeG |
| ASO-599 | 620 | moeApsmoeGpsmoeGpsmoeTpsmoeGpsmoeApsmoeApsmoeGps(5m)CpsGps |
| | | ApsApsGpsTpsGps(5m)CpsApsmoe(5m)CpsmoeApsmoe(5m)CpsmoeG |
| ASO-600 | 621 | moeApsmoeGpsmoeGpsmoeTpsmoeGpsmoeApsApsGps(5m)CpsGpsApsAps |
| | | GpsTpsmoeGpsmoe(5m)CpsmoeApsmoe(5m)CpsmoeApsmoe(5m)CpsmoeG |
| ASO-601 | 622 | moeApsmoeGpsmoeGpsmoeTpsmoeGpsmoeApsmoeApsGps(5m)CpsGpsAps |
| | | ApsGpsTpsGpsmoe(5m)CpsmoeApsmoe(5m)CpsmoeApsmoe(5m)CpsmoeG |
| ASO-602 | 623 | moe(5m)CpsmoeApsmoeGpsmoeApsmoeGpsGpsTypGpsApsApsGps(5m)Cps |
| | | GpsApsApsmoeGpsmoeTpsmoeGpsmoe(5m)CpsmoeA |
| ASO-603 | 624 | moe(5m)CpsmoeApsmoeGpsmoeApsmoeGpsGpsTpsGypApsApsGps(5m)Cps |
| | | GpsApsApsmoeGpsmoeTpsmoeGpsmoe(5m)CpsmoeA |
| ASO-604 | 625 | moe(5m)CpsmoeApsmoeGpsmoeApsmoeGpsGpsTpsGpsAypApsGps(5m)Cps |
| | | GpsApsApsmoeGpsmoeTpsmoeGpsmoe(5m)CpsmoeA |
| ASO-605 | 626 | moe(5m)CpsmoeApsmoeGpsmoeApsmoeGpsGpsTpsGpsApsAypGps(5m)Cps |
| | | GpsApsApsmoeGpsmoeTpsmoeGpsmoe(5m)CpsmoeA |
| ASO-606 | 627 | moe(5m)CpsmoeApsmoeGpsmoeApsmoeGpsGpsTpsGpsApsApsGyp(5m)Cps |
| | | GpsApsApsmoeGpsmoeTpsmoeGpsmoe(5m)CpsmoeA |
| ASO-607 | 628 | moe(5m)CpsmoeApsmoeGpsmoeApsmoeGpsGpsTpsGpsApsApsGps(5m)Cyp |
| | | GpsApsApsmoeGpsmoeTpsmoeGpsmoe(5m)CpsmoeA |
| ASO-608 | 629 | moe(5m)CpsmoeApsmoeGpsmoeApsmoeGpsGpsTpsGpsApsApsGps(5m)Cps |
| | | GypApsApsmoeGpsmoeTpsmoeGpsmoe(5m)CpsmoeA |
| ASO-609 | 630 | moe(5m)CpsmoeApsmoeGpsmoeApsmoeGpsGpsTpsGpsApsApsGps(5m)Cps |
| | | GpsAypApsmoeGpsmoeTpsmoeGpsmoe(5m)CpsmoeA |
| ASO-610 | 631 | moe(5m)CpsmoeApsmoeGpsmoeApsmoeGypGpsTpsGpsApsApsGps(5m)Cps |
| | | GpsApsApsmGpsmoeTpsmGpsmoe(5m)CpsmA |
| ASO-611 | 632 | moe(5m)CpsmoeApsmoeGpsmoeApsmoeGpsGypTpsGpsApsApsGps(5m)Cps |
| | | GpsApsApsmGpsmoeTpsmGpsmoe(5m)CpsmA |
| ASO-612 | 633 | moe(5m)CpsmoeApsmoeGpsmoeApsmoeGpsGpsTypGpsApsApsGps(5m)Cps |
| | | GpsApsApsmGpsmoeTpsmGpsmoe(5m)CpsmA |
| ASO-613 | 634 | moe(5m)CpsmoeApsmoeGpsmoeApsmoeGpsGpsTpsGypApsApsGps(5m)Cps |
| | | GpsApsApsmGpsmoeTpsmGpsmoe(5m)CpsmA |
| ASO-614 | 635 | moe(5m)CpsmoeApsmoeGpsmoeApsmoeGpsGpsTpsGpsAypApsGps(5m)Cps |
| | | GpsApsApsmGpsmoeTpsmGpsmoe(5m)CpsmA |
| ASO-615 | 636 | moe(5m)CpsmoeApsmoeGpsmoeApsmoeGpsGpsTpsGpsApsAypGps(5m)Cps |
| | | GpsApsApsmGpsmoeTpsmGpsmoe(5m)CpsmA |
| ASO-616 | 637 | moe(5m)CpsmoeApsmoeGpsmoeApsmoeGpsGpsTpsGpsApsApsGyp(5m)Cps |
| | | GpsApsApsmGpsmoeTpsmGpsmoe(5m)CpsmA |
| ASO-617 | 638 | moe(5m)CpsmoeApsmoeGpsmoeApsmoeGpsGpsTpsGpsApsApsGps(5m)Cyp |
| | | GpsApsApsmGpsmoeTpsmGpsmoe(5m)CpsmA |
| ASO-618 | 639 | moe(5m)CpsmoeApsmoeGpsmoeApsmoeGpsGpsTpsGpsApsApsGps(5m)Cps |
| | | GypApsApsmGpsmoeTpsmGpsmoe(5m)CpsmA |
| ASO-619 | 640 | moe(5m)CpsmoeApsmoeGpsmoeApsmoeGpsGpsTpsGpsApsApsGps(5m)Cps |
| | | GpsAypApsmGpsmoeTpsmGpsmoe(5m)CpsmA |
| ASO-620 | 641 | moe(5m)CpsmoeApsmoeGpsmoeApsmoeGpsmoeGpsTpsGpsApsApsGps(5m) |
| | | CpsGpsApsApsmoeGpsmoeTpsmoeGpsmoe(5m)CpsmoeA |
| ASO-621 | 642 | moe(5m)CpsmoeApsmoeGpsmoeApsmoeGpsGpsTpsGpsApsApsGps(5m)Cps |
| | | GpsApsmoeApsmoeGpsmoeTpsmoeGpsmoe(5m)CpsmoeA |
| ASO-622 | 643 | moe(5m)CpsmoeApsmoeGpsmoeApsGpsGpsTpsGpsApsApsGps(5m)CpsGps |
| | | moeApsmoeApsmoeGpsmoeTpsmoeGpsmoe(5m)CpsmoeA |
| ASO-623 | 644 | moe(5m)CpsmoeApsmoeGpsmoeApsmoeGpsmoeGpsTpsGpsApsApsGps(5m) |
| | | CpsGpsApsApsGpsmoeTpsmoeGpsmoe(5m)CpsmoeA |
| ASO-624 | 645 | moe(5m)CpsmoeApsmoeGpsmoeApsGpsGpsTpsGpsApsApsGps(5m)CpsGps |
| | | ApsmoeApsmoeGpsmoeTpsmoeGpsmoe(5m)CpsmoeA |
| ASO-625 | 646 | moe(5m)CpsmoeApsmoeGpsmoeApsmoeGpsmoeGpsmoeTpsGpsApsApsGp |
| | | s(5m)CpsGpsApsApsmoeGpsmoeTpsmoeGpsmoe(5m)CpsmoeA |
| ASO-626 | 647 | moe(5m)CpsmoeApsmoeGpsmoeApsmoeGpsmoeGpsTpsGpsApsApsGps |
| | | (5m)CpsGpsApsmoeApsmoeGpsmoeTpsmoeGpsmoe(5m)CpsmoeA |
| ASO-627 | 648 | moe(5m)CpsmoeApsmoeGpsmoeApsmoeGpsGpsTpsGpsApsApsGps(5m)Cps |
| | | GpsmoeApsmoeApsmoeGpsmoeTpsmoeGpsmoe(5m)CpsmoeA |
| ASO-628 | 649 | moe(5m)CpsmoeApsmoeGpsmoeApsmoeGpsmoeGpsmoeTpsGpsApsApsGps |
| | | (5m)CpsGpsApsApsGpsmoeTpsmoeGpsmoe(5m)CpsmoeA |
| ASO-629 | 650 | moeApsmoe(5m)CpsmoeGpsmoeTpsGps(5m)CpsApsGpsApsGpsGpsTpsGps |
| | | ApsmoeApsmoeGpsmoe(5m)CpsmoeGpsmoeApsmoeApsmoeG |
| ASO-630 | 651 | moeApsmoe(5m)CpsmoeGpsmoeTpsmoeGps(5m)CpsApsGpsApsGpsGpsTps |
| | | GpsApsApsmoeGpsmoe(5m)CpsmoeGpsmoeApsmoeApsmoeG |
| ASO-631 | 652 | moeApsmoe(5m)CpsmoeGpsmoeTpsmoeGpsmoe(5m)CpsApsGpsApsGpsGps |
| | | TpsGpsApsApsGpsmoe(5m)CpsmoeGpsmoeApsmoeApsmoeG |
| ASO-632 | 653 | moeApsmoe(5m)CpsmoeGpsmoeTpsmoeGpsmoe(5m)CpsmoeApsGpsApsGps |
| | | GpsTpsGpsApsApsGps(5m)CpsmoeGpsmoeApsmoeApsmoeG |
| ASO-633 | 654 | moeApsmoe(5m)CpsmoeGpsmoeTpsGps(5m)CpsApsGpsApsGpsGpsTpsGps |
| | | moeApsmoeApsmoeGpsmoe(5m)CpsmoeGpsmoeApsmoeApsmoeG |
| ASO-634 | 655 | moeApsmoe(5m)CpsmoeGpsmoeTpsmoeGps(5m)CpsApsGpsApsGpsGpsTps |
| | | GpsApsmoeApsmoeGpsmoe(5m)CpsmoeGpsmoeApsmoeApsmoeG |
| ASO-635 | 656 | moeApsmoe(5m)CpsmoeGpsmoeTpsmoeGpsmoe(5m)CpsApsGpsApsGpsGps |
| | | TpsGpsApsApsmoeGpsmoe(5m)CpsmoeGpsmoeApsmoeApsmoeG |
| ASO-636 | 657 | moeApsmoe(5m)CpsmoeGpsmoeTpsmoeGpsmoe(5m)CpsmoeApsGpsApsGps |
| | | GpsTpsGpsApsApsGpsmoe(5m)CpsmoeGpsmoeApsmoeApsmoeG |
| ASO-637 | 658 | moeApsmoe(5m)CpsmoeGpsmoeTpsmoeGpsmoe(5m)CpsmoeApsmoeGpsAps |
| | | GpsGpsTpsGpsApsApsGps(5m)CpsmoeGpsmoeApsmoeApsmoeG |
| ASO-638 | 659 | moeApsmoe(5m)CpsmoeGpsmoeTpsmoeGpsmoe(5m)CpsApsGpsApsGpsGps |
| | | TpsGpsApsmoeApsmoeGpsmoe(5m)CpsmoeGpsmoeApsmoeApsmoeG |
| ASO-639 | 660 | moeApsmoe(5m)CpsmoeGpsmoeTpsmoeGpsmoe(5m)CpsmoeApsGpsApsGps |
| | | GpsTpsGpsApsApsmoeGpsmoe(5m)CpsmoeGpsmoeApsmoeApsmoeG |
| ASO-640 | 661 | moeApsmoe(5m)CpsmoeGpsmoeTpsmoeGps(5m)CpsApsGpsApsGpsGpsTps |
| | | GpsApsApsGpsmoe(5m)CpsmoeGpsmoeApsmoeApsmoeG |
| ASO-641 | 662 | moe(5m)CpsmoeApslnGpsmoeApsmoeGypGpsTpsGpsApsApsGps(5m)Cps |
| | | GpsApsApsmoeGpsmoeTpslnGpsmoe(5m)CpsmoeA |
| ASO-642 | 663 | moe(5m)CpsmoeApslnGpsmoeApsmoeGpsGypTpsGpsApsApsGps(5m)Cps |
| | | GpsApsApsmoeGpsmoeTpslnGpsmoe(5m)CpsmoeA |
| ASO-643 | 664 | moe(5m)CpsmoeApslnGpsmoeApsmoeGpsGpsTypGpsApsApsGps(5m)Cps |
| | | GpsApsApsmoeGpsmoeTpslnGpsmoe(5m)CpsmoeA |
| ASO-644 | 665 | moe(5m)CpsmoeApslnGpsmoeApsmoeGpsGpsTpsGypApsApsGps(5m)Cps |
| | | GpsApsApsmoeGpsmoeTpslnGpsmoe(5m)CpsmoeA |
| ASO-645 | 666 | moe(5m)CpsmoeApslnGpsmoeApsmoeGpsGpsTpsGpsAypApsGps(5m)Cps |
| | | GpsApsApsmoeGpsmoeTpslnGpsmoe(5m)CpsmoeA |
| ASO-646 | 667 | moe(5m)CpsmoeApslnGpsmoeApsmoeGpsGpsTpsGpsApsAypGps(5m)Cps |
| | | GpsApsApsmoeGpsmoeTpslnGpsmoe(5m)CpsmoeA |
| ASO-647 | 668 | moe(5m)CpsmoeApslnGpsmoeApsmoeGpsGpsTpsGpsApsApsGyp(5m)Cps |
| | | GpsApsApsmoeGpsmoeTpslnGpsmoe(5m)CpsmoeA |
| ASO-648 | 669 | moe(5m)CpsmoeApslnGpsmoeApsmoeGpsGpsTpsGpsApsApsGps(5m)Cyp |
| | | GpsApsApsmoeGpsmoeTpslnGpsmoe(5m)CpsmoeA |
| ASO-649 | 670 | moe(5m)CpsmoeApslnGpsmoeApsmoeGpsGpsTpsGpsApsApsGps(5m)Cps |
| | | GypApsApsmoeGpsmoeTpslnGpsmoe(5m)CpsmoeA |
| ASO-650 | 671 | moe(5m)CpsmoeApslnGpsmoeApsmoeGpsGpsTpsGpsApsApsGps(5m)Cps |
| | | GpsAypApsmoeGpsmoeTpslnGpsmoe(5m)CpsmoeA |
| ASO-651 | 672 | MonoGalNAc4-p-moe(5m)CpsmoeApsmoeGpsmoeApsmoeGpsGpsTpsGps |
| | | ApsApsGps(5m)CpsGpsApsApsmoeGpsmoeTpsmoeGpsmoe(5m)CpsmoeA |
| ASO-652 | 673 | moe(5m)CpsmoeApsmoeGpsmoeApsmoeGpsGpsTpsGpsApsApsGps(5m)Cps |
| | | GpsApsApsmoeGpsmoeTpsmoeGpsmoe(5m)CpsmoeA-monoGalNAc4-p |
| ASO-653 | 674 | diGalNAc4-PS-p-moe(5m)CpsmoeApsmoeGpsmoeApsmoeGpsGpsTpsGps |
| | | ApsApsGps(5m)CpsGpsApsApsmoeGpsmoeTpsmoeGpsmoe(5m)CpsmoeA |
| ASO-654 | 675 | moe(5m)CpsmoeApsmoeGpsmoeApsmoeGpsGpsTpsGpsApsApsGps(5m)Cps |
| | | GpsApsApsmoeGpsmoeTpsmoeGpsmoe(5m)CpsmoeA-diGalNAc4-PS-p |
| ASO-655 | 676 | monoGalNAc4-p-moe(5m)CpsmoeApsmoeGpsmoeApsmoeGpsGpsTpsGps |
| | | ApsApsGps(5m)CpsGpsApsApsmoeGpsmoeTpsmoeGpsmoe(5m)CpsmoeA- |
| | | monGalNAc4-p |
| ASO-656 | 677 | monoGalNAc4-ps-moe(5m)CpsmoeApsmoeGpsmoeApsmoeGpsGpsTpsGps |
| | | ApsApsGps(5m)CpsGpsApsApsmoeGpsmoeTpsmoeGpsmoe(5m)CpsmoeA |
| ASO-657 | 678 | monoGalNAc4-ps-moe(5m)CpsmoeApsmoeGpsmoeApsmoeGpsGpsTpsGps |
| | | ApsApsGps(5m)CpsGpsApsApsmoeGpsmoeTpsmoeGpsmoe(5m)CpsmoeA |
| ASO-658 | 679 | moe(5m)CpsmoeApslnGpsmoeApslnGps5ocpGpsTpsGpsApsApsGps(5m)Cps |
| | | GpsApsApsmoeGpsmoeTpsmoeGpsmoe(5m)CpsmoeA |
| ASO-659 | 680 | moe(5m)CpsmoeApslnGpsmoeApslnGps5omcpGpsTpsGpsApsApsGps(5m) |
| | | CpsGpsApsApsmoeGpsmoeTpsmoeGpsmoe(5m)CpsmoeA |
| ASO-660 | 681 | moe(5m)CpsmoeApslnGpsmoeApslnGpsGpsTps5ocpGpsApsApsGps(5m)Cps |
| | | GpsApsApsmoeGpsmoeTpsmoeGpsmoe(5m)CpsmoeA |
| ASO-661 | 682 | moe(5m)CpsmoeApslnGpsmoeApslnGpsGpsTps5omcGpsApsApsGps(5m)Cps |
| | | GpsApsApsmoeGpsmoeTpsmoeGpsmoe(5m)CpsmoeA |
| ASO-662 | 683 | moe(5m)CpsmoeApslnGpsmoeApsmoeGps5ocpGpsTpsGpsApsApsGps(5m) |
| | | CpsGpsApsApsmoeGpsmoeTpslnGpsmoe(5m)CpsmoeA |
| ASO-663 | 684 | moe(5m)CpsmoeApslnGpsmoeApsmoeGps5omcpGpsTpsGpsApsApsGps(5m) |
| | | CpsGpsApsApsmoeGpsmoeTpslnGpsmoe(5m)CpsmoeA |
| ASO-664 | 685 | moe(5m)CpsmoeApslnGpsmoeApsmoeGpsGpsTps5ocpGpsApsApsGps(5m) |
| | | CpsGpsApsApsmoeGpsmoeTpslnGpsmoe(5m)CpsmoeA |
| ASO-665 | 686 | moe(5m)CpsmoeApslnGpsmoeApsmoeGpsGpsTps5omcpGpsApsApsGps(5m) |
| | | CpsGpsApsApsmoeGpsmoeTpslnGpsmoe(5m)CpsmoeA |
| ASO-666 | 687 | moeApsmoeGpslnGpsmoeTpslnGpsApsAps5ocpGps(5m)CpsGpsApsApsGps |
| | | TpsGpsmoe(5m)CpsmoeApsmoe(5m)CpsmoeApsmoe(5m)C |
| ASO-667 | 688 | moeApsmoeGpslnGpsmoeTpslnGpsApsAps5omcpGps(5m)CpsGpsApsApsGps |
| | | TpsGpsmoe(5m)CpsmoeApsmoe(5m)CpsmoeApsmoe(5m)C |
| ASO-668 | 689 | moe(5m)CpsmoeApslnGpsmoeApsGpsGpsTpsGpsApsApsGps(5m)CpsGpsAps |
| | | ApsmoeGpsmoeTpslnGpsmoe(5m)CpsmoeA |
| ASO-669 | 690 | moe(5m)CpsmoeApslnGpsmoeApsmoeGpsGpsTpsGpsApsApsGps(5m)Cps |
| | | GpsApsApsGpsmoeTpslnGpsmoe(5m)CpsmoeA |
| ASO-670 | 691 | moe(5m)CpsmoeApslnGpsmoeApsmoeGpsmoeGpsTpsGpsApsApsGps(5m) |
| | | CpsGpsApsApsmoeGpsmoeTpslnGpsmoe(5m)CpsmoeA |
| ASO-671 | 692 | moe(5m)CpsmoeApslnGpsmoeApsmoeGpsGpsTpsGpsApsApsGps(5m)Cps |
| | | GpsApsmoeApsmoeGpsmoeTpslnGpsmoe(5m)CpsmoeA |
| ASO-672 | 693 | moeGpsmoe(5m)CpsmoeApsmoeGpsmoeApsmXpsGpsTpsGpsApsApsGps |
| | | (5m)CpsGpsApsmoeApsmoeGpsmoeTpsmoeGpsmoe(5m)C |
| ASO-673 | 694 | moeGpsmoe(5m)CpsmoeApsmoeGpsmoeApsGpsmXpsTpsGpsApsApsGps |
| | | (5m)CpsGpsApsmoeApsmoeGpsmoeTpsmoeGpsmoe(5m)C |
| ASO-674 | 695 | moeGpsmoe(5m)CpsmoeApsmoeGpsmoeApsGpsGpsmXpsGpsApsApsGps |
| | | (5m)CpsGpsApsmoeApsmoeGpsmoeTpsmoeGpsmoe(5m)C |
| ASO-675 | 696 | moeGpsmoe(5m)CpsmoeApsmoeGpsmoeApsGpsGpsTpsmXpsApsApsGps |
| | | (5m)CpsGpsApsmoeApsmoeGpsmoeTpsmoeGpsmoe(5m)C |
| ASO-676 | 697 | moeGpsmoe(5m)CpsmoeApsmoeGpsmoeApsGpsGpsTpsGpsmXpsApsGps |
| | | (5m)CpsGpsApsmoeApsmoeGpsmoeTpsmoeGpsmoe(5m)C |
| ASO-677 | 698 | moeGpsmoe(5m)CpsmoeApsmoeGpsmoeApsGpsGpsTpsGpsApsmXpsGps |
| | | (5m)CpsGpsApsmoeApsmoeGpsmoeTpsmoeGpsmoe(5m)C |
| ASO-678 | 699 | moeGpsmoe(5m)CpsmoeApsmoeGpsmoeApsGpsGpsTpsGpsApsApsmXps |
| | | (5m)CpsGpsApsmoeApsmoeGpsmoeTpsmoeGpsmoe(5m)C |
| ASO-679 | 700 | moeGpsmoe(5m)CpsmoeApsmoeGpsmoeApsGpsGpsTpsGpsApsApsGpsmXps |
| | | GpsApsmoeApsmoeGpsmoeTpsmoeGpsmoe(5m)C |
| ASO-680 | 701 | moeGpsmoe(5m)CpsmoeApsmoeGpsmoeApsGpsGpsTpsGpsApsApsGps(5m) |
| | | CpsmXpsApsmoeApsmoeGpsmoeTpsmoeGpsmoe(5m)C |
| ASO-681 | 702 | moeGpsmoe(5m)CpsmoeApsmoeGpsmoeApsGpsGpsTpsGpsApsApsGps(5m) |
| | | CpsGpsmXpsmoeApsmoeGpsmoeTpsmoeGpsmoe(5m)C |
| ASO-682 | 703 | moeGpsmoe(5m)CpsmoeApsmoeGpsmoeApsGpsGpsTpsApsApsApsGps(5m) |
| | | CpsGpsApsmoeApsmoeGpsmoeTpsmoeGpsmoe(5m)C |
| ASO-683 | 704 | moeGpsmoe(5m)CpsmoeApsmoeGpsmoeApsGpsGpsTps(5m)CpsApsApsGps |
| | | (5m)CpsGpsApsmoeApsmoeGpsmoeTpsmoeGpsmoe(5m)C |
| ASO-684 | 705 | moeGpsmoe(5m)CpsmoeApsmoeGpsmoeApsGpsGpsTpsTpsApsApsGps(5m) |
| | | CpsGpsApsmoeApsmoeGpsmoeTpsmoeGpsmoe(5m)C |
| ASO-685 | 706 | moeGpsmoe(5m)CpsmoeApsmoeGpsmoeApsGpsGpsTpsGps(5m)CpsApsGps |
| | | (5m)CpsGpsApsmoeApsmoeGpsmoeTpsmoeGpsmoe(5m)C |
| ASO-686 | 707 | moeGpsmoe(5m)CpsmoeApsmoeGpsmoeApsGpsGpsTpsGpsGpsApsGps(5m) |
| | | CpsGpsApsmoeApsmoeGpsmoeTpsmoeGpsmoe(5m)C |
| ASO-687 | 708 | moeGpsmoe(5m)CpsmoeApsmoeGpsmoeApsGpsGpsTpsGpsTpsApsGps(5m) |
| | | CpsGpsApsmoeApsmoeGpsmoeTpsmoeGpsmoe(5m)C |
| ASO-688 | 709 | moeGpsmoe(5m)CpsmoeApsmoeGpsmoeApsGpsGpsTpsGpsAps(5m)CpsGps |
| | | (5m)CpsGpsApsmoeApsmoeGpsmoeTpsmoeGpsmoe(5m)C |
| ASO-689 | 710 | moeGpsmoe(5m)CpsmoeApsmoeGpsmoeApsGpsGpsTpsGpsApsGpsGps(5m) |
| | | CpsGpsApsmoeApsmoeGpsmoeTpsmoeGpsmoe(5m)C |
| ASO-690 | 711 | moeGpsmoe(5m)CpsmoeApsmoeGpsmoeApsGpsGpsTpsGpsApsTpsGps(5m) |
| | | CpsGpsApsmoeApsmoeGpsmoeTpsmoeGpsmoe(5m)C |
| ASO-691 | 712 | moeGpsmoe(5m)CpsmoeApsmoeGpsmoeApsGpsGpsTpsGpsApsApsAps(5m) |
| | | CpsGpsApsmoeApsmoeGpsmoeTpsmoeGpsmoe(5m)C |
| ASO-692 | 713 | moeGpsmoe(5m)CpsmoeApsmoeGpsmoeApsGpsGpsTpsGpsApsAps(5m)Cps |
| | | (5m)CpsGpsApsmoeApsmoeGpsmoeTpsmoeGpsmoe(5m)C |
| ASO-693 | 714 | moeGpsmoe(5m)CpsmoeApsmoeGpsmoeApsGpsGpsTpsGpsApsApsTps(5m) |
| | | CpsGpsApsmoeApsmoeGpsmoeTpsmoeGpsmoe(5m)C |
| ASO-694 | 715 | moe(5m)CpslnApsmoeGpsmoeApsmoeGpsGpsTpsGpsApsApsGps(5m)Cps |
| | | GpsApsApsmoeGpslnTpsmoeGpsr?moe(5m)CpsmoeA |
| ASO-695 | 716 | moe(5m)CpsmoeApslnGpsmoeApsmoeGpsGpsTpsGpsApsApsGps(5m)Cps |
| | | GpsApsApsmoeGpslnTpsmoeGpsr?moe(5m)CpsmoeA |
| ASO-696 | 717 | moeGpsmoe(5m)CpsmoeApsmoeGpsmoeApsGpsGpsTpsGpsmoeApsApsGps |
| | | (5m)CpsGpsApsmoeApslnGpsmoeTpslnGpsmoe(5m)C |
| ASO-697 | 718 | moeGpsmoe(5m)CpsmoeApsmoeGpsmoeApsGpsGpsTpsGpsmoeApsApsGps |
| | | (5m)CpsGpsApsmoeApslnGpsmoeTpsmoeGpsln(5m)C |
| ASO-698 | 719 | moeGpsmoe(5m)CpsmoeApsmoeGpsmoeApsGpsGpsTpsGpsmoeApsApsGps |
| | | (5m)CpsGpsApsmoeApsmoeGpsmoeTpslnGpsln(5m)C |
| ASO-699 | 720 | moeGpsmoe(5m)CpsmoeApsmoeGpsmoeApsGpsGpsTpsGpsmoeApsApsGps |
| | | (5m)CpsGpsApsmoeApslnGpsmoesmoeGpsmoe(5m)C |
| ASO-700 | 721 | moeGpsmoe(5m)CpsmoeApsmoeGpsmoeApsGpsGpsTpsGpsmoeApsApsGps |
| | | (5m)CpsGpsApsmoeApsmoeGpsmoeTpslnGpsmoe(5m)C |
| ASO-701 | 722 | moeGpsmoe(5m)CpsmoeApsmoeGpsmoeApsGpsGpsTpsGpsmoeApsApsGps |
| | | (5m)CpsGpsApsmoeApsmoeGpsmoeTpsmoeGpsln(5m)C |
| ASO-702 | 723 | moeGpsmoe(5m)CpsmoeApsmoeGpsmoeApsdXpsGpsTpsGpsApsApsGps(5m) |
| | | CpsGpsApsmoeApsmoeGpsmoeTpsmoeGpsmoe(5m)C |
| ASO-703 | 724 | moeGpsmoe(5m)CpsmoeApsmoeGpsmoeApsGpsdXpsTpsGpsApsApsGps(5m) |
| | | CpsGpsApsmoeApsmoeGpsmoeTpsmoeGpsmoe(5m)C |
| ASO-704 | 725 | moeGpsmoe(5m)CpsmoeApsmoeGpsmoeApsGpsGpsdXpsGpsApsApsGps(5m) |
| | | CpsGpsApsmoeApsmoeGpsmoeTpsmoeGpsmoe(5m)C |
| ASO-705 | 726 | moeGpsmoe(5m)CpsmoeApsmoeGpsmoeApsGpsGpsTpsdXpsApsApsGps(5m) |
| | | CpsGpsApsmoeApsmoeGpsmoeTpsmoeGpsmoe(5m)C |
| ASO-706 | 727 | moeGpsmoe(5m)CpsmoeApsmoeGpsmoeApsGpsGpsTpsGpsdXpsApsGps(5m) |
| | | CpsGpsApsmoeApsmoeGpsmoeTpsmoeGpsmoe(5m)C |
| ASO-707 | 728 | moeGpsmoe(5m)CpsmoeApsmoeGpsmoeApsGpsGpsTpsGpsApsdXpsGps(5m) |
| | | CpsGpsApsmoeApsmoeGpsmoeTpsmoeGpsmoe(5m)C |
| ASO-708 | 729 | moeGpsmoe(5m)CpsmoeApsmoeGpsmoeApsGpsGpsTpsGpsApsApsdXps(5m) |
| | | CpsGpsApsmoeApsmoeGpsmoeTpsmoeGpsmoe(5m)C |
| ASO-709 | 730 | moeGpsmoe(5m)CpsmoeApsmoeGpsmoeApsGpsGpsTpsGpsApsApsGpsdXps |
| | | GpsApsmoeApsmoeGpsmoeTpsmoeGpsmoe(5m)C |
| ASO-710 | 731 | moeGpsmoe(5m)CpsmoeApsmoeGpsmoeApsGpsGpsTpsGpsApsApsGps(5m) |
| | | CpsdXpsApsmoeApsmoeGpsmoeTpsmoeGpsmoe(5m)C |
| ASO-711 | 732 | moeGpsmoe(5m)CpsmoeApsmoeGpsmoeApsGpsGpsTpsGpsApsApsGps(5m) |
| | | CpsGpsdXpsmoeApsmoeGpsmoeTpsmoeGpsmoe(5m)C |
| ASO-712 | 733 | moe(5m)CpsmoeApsmoeGpsmoeApsmoeGpsGpsTpsGpsApsApsGps(5m)Cps |
| | | GpsApsApsmoeGpsgutbTpsmoeGpsmoe(5m)CpsmoeA |
| ASO-713 | 734 | moe(5m)CpsmoeApsmoeGpsmoeApsmoeGpsGpsTpsGpsApsApsGps(5m)Cps |
| | | GpsApsApsmoeGpsmoeTpsgutbGpsmoe(5m)CpsmoeA |
| ASO-714 | 735 | moe(5m)CpsmoeApsmoeGpsmoeApsmoeGpsGpsTpsGpsApsApsGps(5m)Cps |
| | | GpsApsApsmoeGpsmoeTpsmoeGpsgutb(5m)CpsmoeA |
| ASO-715 | 736 | moe(5m)CpsgutbApsmoeGpsmoeApsmoeGpsGpsTpsGpsApsApsGps(5m)Cps |
| | | GpsApsApsmoeGpsmoeTpsmoeGpsgutb(5m)CpsmoeA |
| ASO-716 | 737 | moeGpsgutb(5m)CpsmoeApsmoeGpsApsGpsGpsTpsGpsmXpsApsGps(5m) |
| | | CpsGpsApsmoeApsmoeGpsmoeTpsmoeGpsmoe(5m)C |
| ASO-717 | 738 | moeGpsmoe(5m)CpsgutbApsmoeGpsApsGpsGpsTpsGpsmXpsApsGps(5m) |
| | | CpsGpsApsmoeApsmoeGpsmoeTpsmoeGpsmoe(5m)C |
| ASO-718 | 739 | moeGpsmoe(5m)CpsmoeApsmoeGpsApsGpsGpsTpsGpsmXpsApsGps(5m) |
| | | CpsGpsApsgutbApsmoeGpsmoeTpsmoeGpsmoe(5m)C |
| ASO-719 | 740 | moeGpsmoe(5m)CpsmoeApsmoeGpsApsGpsGpsTpsGpsmXpsApsGps(5m) |
| | | CpsGpsApsmoeApsmoeGpsgutbTpsmoeGpsmoe(5m)C |
| ASO-720 | 741 | moeGpsmoe(5m)CpsmoeApsmoeGpsApsGpsGpsTpsGpsmXpsApsGps(5m) |
| | | CpsGpsApsmoeApsmoeGpsmoeTpsmoeGpsgutb(5m)C |
| ASO-721 | 742 | moeGpsgutb(5m)CpsgutbApsmoeGpsApsGpsGpsTpsGpsmXpsApsGps(5m) |
| | | CpsGpsApsmoeApsmoeGpsmoeTpsmoeGpsmoe(5m)C |
| ASO-722 | 743 | moeGpsgutb(5m)CpsmoeApsmoeGpsApsGpsGpsTpsGpsmXpsApsGps(5m) |
| | | CpsGpsApsgutbApsmoeGpsmoeTpsmoeGpsmoe(5m)C |
| ASO-723 | 744 | moeGpsgutb(5m)CpsmoeApsmoeGpsApsGpsGpsTpsGpsmXpsApsGps(5m) |
| | | CpsGpsApsmoeApsmoeGpsgutbTpsmoeGpsmoe(5m)C |
| ASO-724 | 745 | moeGpsgutb(5m)CpsmoeApsmoeGpsApsGpsGpsTpsGpsmXpsApsGps(5m) |
| | | CpsGpsApsmoeApsmoeGpsmoeTpsmoeGpsgutb(5m)C |
| ASO-725 | 746 | moeGpsmoe(5m)CpsgutbApsmoeGpsApsGpsGpsTpsGpsmXpsApsGps(5m) |
| | | CpsGpsApsgutbApsmoeGpsmoeTpsmoeGpsmoe(5m)C |
| ASO-726 | 747 | moeGpsmoe(5m)CpsgutbApsmoeGpsApsGpsGpsTpsGpsmXpsApsGps(5m) |
| | | CpsGpsApsmoeApsmoeGpsgutbTpsmoeGpsmoe(5m)C |
| ASO-727 | 748 | moeGpsmoe(5m)CpsgutbApsmoeGpsApsGpsGpsTpsGpsmXpsApsGps(5m) |
| | | CpsGpsApsmoeApsmoeGpsmoeTpsmoeGpsgutb(5m)C |
| ASO-728 | 749 | moeGpsmoe(5m)CpsmoeApsmoeGpsApsGpsGpsTpsGpsmXpsApsGps(5m) |
| | | CpsGpsApsgutbApsmoeGpsgutbTpsmoeGpsmoe(5m)C |
| ASO-729 | 750 | moeGpsmoe(5m)CpsmoeApsmoeGpsApsGpsGpsTpsGpsmXpsApsGps(5m) |
| | | CpsGpsApsgutbApsmoeGpsmoeTpsmoeGpsgutb(5m)C |
| ASO-730 | 751 | moeGpsmoe(5m)CpsmoeApsmoeGpsApsGpsGpsTpsGpsmXpsApsGps(5m) |
| | | CpsGpsApsmoeApsmoeGpsgutbTpsmoeGpsgutb(5m)C |
| ASO-731 | 752 | moeTpsmoeGpsmoe(5m)CpsmoeApsmoeGpsApsGpsGpsTpsGpsApsApsGps |
| | | (5m)CpsGpsmoeApsmoeApsmoeGpsmoeTpsmoeGpsmoe(5m)C |
| ASO-732 | 753 | moeTpsmoeGpsmoe(5m)CpsmoeApsmoeGpsmoeApsGpsGpsTpsGpsApsAps |
| | | Gps(5m)CpsGpsApsmoeApsmoeGpsmoeTpsmoeGpsmoe(5m)C |
| ASO-733 | 754 | moeGpsmoeTpsmoeGpsmoe(5m)CpsmoeApsGpsApsGpsGpsTpsGpsApsAps |
| | | Gps(5m)CpsmoeGpsmoeApsmoeApsmoeGpsmoeTpsmoeG |
| ASO-734 | 755 | moeGpsmoeTpsmoeGpsmoe(5m)CpsmoeApsmoeGpsApsGpsGpsTpsGpsAps |
| | | ApsGps(5m)CpsGpsmoeApsmoeApsmoeGpsmoeTpsmoeG |
| ASO-735 | 756 | moe(5m)CpsmoeGpsmoeTpsmoeGpsmoe(5m)CpsApsGpsApsGpsGpsTpsGps |
| | | ApsApsGpsmoe(5m)CpsmoeGpsmoeApsmoeApsmoeGpsmoeT |
| ASO-736 | 757 | moe(5m)CpsmoeGpsmoeTpsmoeGpsmoe(5m)CpsmoeApsGpsApsGpsGpsTps |
| | | GpsApsApsGps(5m)CpsmoeGpsmoeApsmoeApsmoeGpsmoeT |
| ASO-737 | 758 | moe(5m)CpslnApsmoeGpsmoeApsmoeGpsGpsTpsGpsApsApsGps(5m)Cps |
| | | GpsApsApsmGpsmoeTpslnGpsmoe(5m)CpsmA |
| ASO-738 | 759 | moe(5m)CpslnApsmoeGpsmoeApsmoeGpsGpsTpsGpsApsApsGps(5m)Cps |
| | | GpsApsApsmoeGpsmoeTpslnGpsm(5m)CpsmA |
| ASO-739 | 760 | moe(5m)CpslnApsmoeGpsmoeApsmoeGpsGpsTpsGpsApsApsGps(5m)Cps |
| | | GpsApsApsmGpslnTpsmGpsmoe(5m)CpsmoeA |
| ASO-740 | 761 | moe(5m)CpslnApsmoeGpsmoeApsmoeGpsGpsTpsGpsApsApsGps(5m)Cps |
| | | GpsApsApsmoeGpslnTpsmGpsm(5m)CpsmoeA |
| ASO-741 | 762 | moe(5m)CpsmoeApslnGpsmoeApsmoeGpsGpsTpsGpsApsApsGps(5m)Cps |
| | | GpsApsApsmGpsmoeTpsmGpsln(5m)CpsmoeA |
| ASO-742 | 763 | moe(5m)CpsmoeApslnGpsmoeApsmoeGpsGpsTpsGpsApsApsGps(5m)Cps |
| | | GpsApsApsmoeGpsmoeTpsmGpsln(5m)CpsmA |
| ASO-743 | 764 | moeGpsmoe(5m)CpsmoeApsmoeGpsmoeApsApsGpsTpsGpsApsApsGps(5m) |
| | | CpsGpsApsmoeApsmoeGpsmoeTpsmoeGpsmoe(5m)C |
| ASO-744 | 765 | moeGpsmoe(5m)CpsmoeApsmoeGpsmoeAps(5m)CpsGpsTpsGpsApsApsGps |
| | | (5m)CpsGpsApsmoeApsmoeGpsmoeTpsmoeGpsmoe(5m)C |
| ASO-745 | 766 | moeGpsmoe(5m)CpsmoeApsmoeGpsmoeApsTpsGpsTpsGpsApsApsGps(5m) |
| | | CpsGpsApsmoeApsmoeGpsmoeTpsmoeGpsmoe(5m)C |
| ASO-746 | 767 | moeGpsmoe(5m)CpsmoeApsmoeGpsmoeApsGpsApsTpsGpsApsApsGps(5m) |
| | | CpsGpsApsmoeApsmoeGpsmoeTpsmoeGpsmoe(5m)C |
| ASO-747 | 768 | moeGpsmoe(5m)CpsmoeApsmoeGpsmoeApsGps(5m)CpsTpsGpsApsApsGps |
| | | (5m)CpsGpsApsmoeApsmoeGpsmoeTpsmoeGpsmoe(5m)C |
| ASO-748 | 769 | moeGpsmoe(5m)CpsmoeApsmoeGpsmoeApsGpsTpsTpsGpsApsApsGps(5m) |
| | | CpsGpsApsmoeApsmoeGpsmoeTpsmoeGpsmoe(5m)C |
| ASO-749 | 770 | moeGpsmoe(5m)CpsmoeApsmoeGpsmoeApsGpsGpsApsGpsApsApsGps(5m) |
| | | CpsGpsApsmoeApsmoeGpsmoeTpsmoeGpsmoe(5m)C |
| ASO-750 | 771 | moeGpsmoe(5m)CpsmoeApsmoeGpsmoeApsGpsGps(5m)CpsGpsApsApsGps |
| | | (5m)CpsGpsApsmoeApsmoeGpsmoeTpsmoeGpsmoe(5m)C |
| ASO-751 | 772 | moeGpsmoe(5m)CpsmoeApsmoeGpsmoeApsGpsGpsGpsGpsApsApsGps(5m) |
| | | CpsGpsApsmoeApsmoeGpsmoeTpsmoeGpsmoe(5m)C |
| ASO-752 | 773 | moe(5m)CpsmoeApsmoeGpsmoeApsmoeGpsGpsTpsGpsApsApsd(8nh)Gps |
| | | (5m)CpsGpsApsApslnGpsmoeTpslnGpsmoe(5m)CpsgutbA |
| ASO-753 | 774 | moeGpsmoe(5m)CpsmoeApsmoeGpsmoeApsGpsGpsTpsGpsApsApsGps(5m) |
| | | CpsGpsGpsmoeApsmoeGpsmoeTpsmoeTpsmoe(5m)C |
| ASO-754 | 775 | moeGpsmoe(5m)CpsmoeApsmoeGpsApsGpsGpsTpsGpsmoeApsApsGps(5m) |
| | | CpsGpsApsmoeApslnApsmoeTpslnGpsln(5m)C |
| ASO-755 | 776 | moeGpsmoe(5m)CpsmoeApsmoeGpsmoeApsGpsGpsTpsGpsApsApsGps(5m) |
| | | CpsGpsTpsmoeApsmoeGpsmoeTpsmoeTpsmoe(5m)C |
| ASO-756 | 777 | moeGpsmoe(5m)CpsmoeApsmoeGpsmoeApsGpsGpsTpsGpsApsApsGps(5m) |
| | | CpsGps(5m)CpsmoeApsmoeGpsmoeTpsmoeTpsmoe(5m)C |
| ASO-757 | 778 | moeGpsmoe(5m)CpsmoeApsmoeGpsmoeApsGpsGpsTpsGpsApsApsGps(5m) |
| | | CpsApsApsmoeApsmoeGpsmoeTpsmoeTpsmoe(5m)C |
| ASO-758 | 779 | moeGpsmoe(5m)CpsmoeApsmoeGpsmoeApsGpsGpsTpsGpsApsApsGps(5m) |
| | | CpsTpsApsmoeApsmoeGpsmoeTpsmoeTpsmoe(5m)C |
| ASO-759 | 780 | moeGpsmoe(5m)CpsmoeApsmoeGpsmoeApsGpsGpsTpsGpsApsApsGps(5m) |
| | | Cps(5m)CpsApsmoeApsmoeGpsmoeTpsmoeTpsmoe(5m)C |
| ASO-760 | 781 | moeGpsmoe(5m)CpsmoeApsmoeGpsmoeApsGpsGpsTpsGpsApsApsGpsAps |
| | | GpsApsmoeApsmoeGpsmoeTpsmoeTpsmoe(5m)C |
| ASO-761 | 782 | moeGpsmoe(5m)CpsmoeApsmoeGpsmoeApsGpsGpsTpsGpsApsApsGpsTps |
| | | GpsApsmoeApsmoeGpsmoeTpsmoeTpsmoe(5m)C |
| ASO-762 | 783 | moeGpsmoe(5m)CpsmoeApsmoeGpsmoeApsGpsGpsTpsGpsApsApsGpsGps |
| | | GpsApsmoeApsmoeGpsmoeTpsmoeTpsmoe(5m)C |
| ASO-763 | 784 | moeGpsmoe(5m)CpsmoeApsmoeGpsmoeApsGpsGpsTpsGpsApsApsGps(5m) |
| | | CpsGpsApsmXpsmoeGpsmoeTpsmoeTpsmoe(5m)C |
| ASO-764 | 785 | moeGpsmoe(5m)CpsmoeApsmoeGpsmoeApsGpsGpsTpsGpsApsApsGps(5m) |
| | | CpsGpsApsmoeApsmXpsmoeTpsmoeTpsmoe(5m)C |
| ASO-765 | 786 | moeGpsmoe(5m)CpsmoeApsmoeGpsmoeApsGpsGpsTpsGpsApsApsGps(5m) |
| | | CpsGpsApsmoeApsmoeGpsmXpsmoeTpsmoe(5m)C |
| ASO-766 | 787 | moeGpsmoe(5m)CpsmoeApsmoeGpsmoeApsGpsGpsTpsGpsApsApsGps(5m) |
| | | CpsGpsApsmoeApsmoeGpsmoeTpsmXpsmoe(5m)C |
| ASO-767 | 788 | moeGpsmoe(5m)CpsmoeApsmoeGpsmoeApsGpsGpsTpsGpsApsApsGps(5m) |
| | | CpsGpsApsmoeApsmoeGpsmoeTpsmoeTpsmX |
| ASO-768 | 789 | moeGpsmoe(5m)CpsmoeApsmoeGpsApsGpsGpsTpsGpsmoeApsApsGps(5m) |
| | | CpsGpsApsmoeApsln(5m)CpsmoeTpslnGpsln(5m)C |
| ASO-769 | 790 | moeGpsmoe(5m)CpsmoeApsmoeGpsApsGpsGpsTpsGpsmoeApsApsGps(5m) |
| | | CpsGpsApsmoeApslnTpsmoeTpslnGpsln(5m)C |
| ASO-770 | 791 | moeGpsmoe(5m)CpsmoeApsmoeGpsApsGpsGpsTpsGpsmoeApsApsGps(5m) |
| | | CpsGpsApsmoeApslnGpsmoeTpslnApsln(5m)C |
| ASO-771 | 792 | moeGpsmoe(5m)CpsmoeApsmoeGpsApsGpsGpsTpsGpsmoeApsApsGps(5m) |
| | | CpsGpsApsmoeApslnGpsmoeTpsln(5m)Cpsln(5m)C |
| ASO-772 | 793 | moeGpsmoe(5m)CpsmoeApsmoeGpsApsGpsGpsTpsGpsmoeApsApsGps(5m) |
| | | CpsGpsApsmoeApslnGpsmoeTpslnTpsln(5m)C |
| ASO-773 | 794 | moeGpsmoe(5m)CpsmoeApsmoeGpsApsGpsGpsTpsGpsmoeApsApsGps(5m) |
| | | CpsGpsApsmoeApslnGpsmoeTpslnGpslnA |
| ASO-774 | 795 | moeGpsmoe(5m)CpsmoeApsmoeGpsApsGpsGpsTpsGpsmoeApsApsGps(5m) |
| | | CpsGpsApsmoeApslnGpsmoeTpslnGpslnG |
| ASO-775 | 796 | moeGpsmoe(5m)CpsmoeApsmoeGpsApsGpsGpsTpsGpsmoeApsApsGps(5m) |
| | | CpsGpsApsmoeApslnGpsmoeTpslnGpslnT |
| ASO-776 | 797 | moeGpsmoeGpsmoeTpsmoeGpsmoeApsApsGps(5m)CpsGpsApsApsGpsTps |
| | | Gps(5m)CpsmoeApsmoe(5m)CpsmoeApsmoe(5m)CpsmoeGpsmoeG |
| ASO-777 | 798 | moeGpsmoeGpsmoeTpsmoeGpsmoeApsmoeApsGps(5m)CpsGpsApsApsGps |
| | | TpsGps(5m)CpsApsmoe(5m)CpsmoeApsmoe(5m)CpsmoeGpsmoeG |
| ASO-778 | 799 | moeGpsmoeApsmoeGpsmoeGpsmoeTpsGpsApsApsGps(5m)CpsGpsApsAps |
| | | GpsTpsmoeGpsmoe(5m)CpsmoeApsmoe(5m)CpsmoeApsmoe(5m)C |
| ASO-779 | 800 | moeGpsmoeApsmoeGpsmoeGpsmoeTpsmoeGpsApsApsGps(5m)CpsGpsAps |
| | | ApsGpsTpsGpsmoe(5m)CpsmoeApsmoe(5m)CpsmoeApsmoe(5m)C |
| ASO-780 | 801 | moeApsmoeGpsmoeApsmoeGpsmoeGpsTpsGpsApsApsGps(5m)CpsGpsAps |
| | | ApsGpsmoeTpsmoeGpsmoe(5m)CpsmoeApsmoe(5m)CpsmoeA |
| ASO-781 | 802 | moeApsmoeGpsmoeApsmoeGpsmoeGpsmoeTpsGpsApsApsGps(5m)CpsGps |
| | | ApsApsGpsTpsmoeGpsmoe(5m)CpsmoeApsmoe(5m)CpsmoeA |
| ASO-782 | 803 | moeGpsmoe(5m)CpsmoeApsmoeGpsmoeApsGpsGpsTpsGpsApsApsGps(5m) |
| | | CpsGpsApsmoeApsmoeGpsmoeTpsmoeGpsmoe(5m)CpsmoeA |
| ASO-783 | 804 | moeGpsmoe(5m)CpsmoeApsmoeGpsmoeApsmoeGpsGpsTpsGpsApsApsGps |
| | | (5m)CpsGpsApsApsmoeGpsmoeTpsmoeGpsmoe(5m)CpsmoeA |
| ASO-784 | 805 | moe(5m)CpsmoeApsmoeGpsmoeApsmoeGpsGpsTpsGpsApsApsd(8nh)Gps |
| | | (5m)CpsGpsApsApsgutbGpsmoeTpslnGpsmoe(5m)CpslnA |
| ASO-785 | 806 | moe(5m)CpsmoeApsmoeGpsmoeApsmoeGpsGpsTpsGpsApsApsd(8nh)Gps |
| | | (5m)CpsGpsApsApslnGpsmoeTpsgutbGpsmoe(5m)CpslnA |
| ASO-786 | 807 | lnGpsln(5m)CpsmoeApsmoeGpsmoeApsmXpsGpsTpsGpsApsApsGps(5m)Cps |
| | | GpsApsmoeApsmoeGpsmoeTpsmoeGpsmoe(5m)C |
| ASO-787 | 808 | lnGpsmoe(5m)CpslnApsmoeGpsmoeApsmXpsGpsTpsGpsApsApsGps(5m)Cps |
| | | GpsApsmoeApsmoeGpsmoeTpsmoeGpsmoe(5m)C |
| ASO-788 | 809 | lnGpsmoe(5m)CpsmoeApslnGpsmoeApsmXpsGpsTpsGpsApsApsGps(5m)Cps |
| | | GpsApsmoeApsmoeGpsmoeTpsmoeGpsmoe(5m)C |
| ASO-789 | 810 | lnGpsmoe(5m)CpsmoeApsmoeGpslnApsmXpsGpsTpsGpsApsApsGps(5m)Cps |
| | | GpsApsmoeApsmoeGpsmoeTpsmoeGpsmoe(5m)C |
| ASO-790 | 811 | lnGpsmoe(5m)CpsmoeApsmoeGpsmoeApsmXpsGpsTpsGpsApsApsGps(5m) |
| | | CpsGpsApslnApsmoeGpsmoeTpsmoeGpsmoe(5m)C |
| ASO-791 | 812 | lnGpsmoe(5m)CpsmoeApsmoeGpsmoeApsmXpsGpsTpsGpsApsApsGps(5m) |
| | | CpsGpsApsmoeApslnGpsmoeTpsmoeGpsmoe(5m)C |
| ASO-792 | 813 | lnGpsmoe(5m)CpsmoeApsmoeGpsmoeApsmXpsGpsTpsGpsApsApsGps(5m) |
| | | CpsGpsApsmoeApsmoeGpslnTpsmoeGpsmoe(5m)C |
| ASO-793 | 814 | lnGpsmoe(5m)CpsmoeApsmoeGpsmoeApsmXpsGpsTpsGpsApsApsGps(5m) |
| | | CpsGpsApsmoeApsmoeGpsmoeTpslnGpsmoe(5m)C |
| ASO-794 | 815 | lnGpsmoe(5m)CpsmoeApsmoeGpsmoeApsmXpsGpsTpsGpsApsApsGps(5m) |
| | | CpsGpsApsmoeApsmoeGpsmoeTpsmoeGpsln(5m)C |
| ASO-795 | 816 | moeGpsln(5m)CpslnApsmoeGpsmoeApsmXpsGpsTpsGpsApsApsGps(5m) |
| | | CpsGpsApsmoeApsmoeGpsmoeTpsmoeGpsmoe(5m)C |
| ASO-796 | 817 | moeGpsln(5m)CpsmoeApslnGpsmoeApsmXpsGpsTpsGpsApsApsGps(5m) |
| | | CpsGpsApsmoeApsmoeGpsmoeTpsmoeGpsmoe(5m)C |
| ASO-797 | 818 | moeGpsln(5m)CpsmoeApsmoeGpslnApsmXpsGpsTpsGpsApsApsGps(5m) |
| | | CpsGpsApsmoeApsmoeGpsmoeTpsmoeGpsmoe(5m)C |
| ASO-798 | 819 | moeGpsln(5m)CpsmoeApsmoeGpsmoeApsmXpsGpsTpsGpsApsApsGps(5m) |
| | | CpsGpsApslnApsmoeGpsmoeTpsmoeGpsmoe(5m)C |
| ASO-799 | 820 | moeGpsln(5m)CpsmoeApsmoeGpsmoeApsmXpsGpsTpsGpsApsApsGps(5m) |
| | | CpsGpsApsmoeApslnGpsmoeTpsmoeGpsmoe(5m)C |
| ASO-800 | 821 | moeGpsln(5m)CpsmoeApsmoeGpsmoeApsmXpsGpsTpsGpsApsApsGps(5m) |
| | | CpsGpsApsmoeApsmoeGpslnTpsmoeGpsmoe(5m)C |
| ASO-801 | 822 | moeGpsln(5m)CpsmoeApsmoeGpsmoeApsmXpsGpsTpsGpsApsApsGps(5m) |
| | | CpsGpsApsmoeApsmoeGpsmoeTpslnGpsmoe(5m)C |
| ASO-802 | 823 | moeGpsln(5m)CpsmoeApsmoeGpsmoeApsmXpsGpsTpsGpsApsApsGps(5m) |
| | | CpsGpsApsmoeApsmoeGpsmoeTpsmoeGpsln(5m)C |
| ASO-803 | 824 | moeGpsmoe(5m)CpslnApslnGpsmoeApsmXpsGpsTpsGpsApsApsGps(5m) |
| | | CpsGpsApsmoeApsmoeGpsmoeTpsmoeGpsmoe(5m)C |
| ASO-804 | 825 | moeGpsmoe(5m)CpslnApsmoeGpslnApsmXpsGpsTpsGpsApsApsGps(5m) |
| | | CpsGpsApsmoeApsmoeGpsmoeTpsmoeGpsmoe(5m)C |
| ASO-805 | 826 | moeGpsmoe(5m)CpslnApsmoeGpsmoeApsmXpsGpsTpsGpsApsApsGps(5m) |
| | | CpsGpsApslnApsmoeGpsmoeTpsmoeGpsmoe(5m)C |
| ASO-806 | 827 | moeGpsmoe(5m)CpslnApsmoeGpsmoeApsmXpsGpsTpsGpsApsApsGps(5m) |
| | | CpsGpsApsmoeApslnGpsmoeTpsmoeGpsmoe(5m)C |
| ASO-807 | 828 | moeGpsmoe(5m)CpslnApsmoeGpsmoeApsmXpsGpsTpsGpsApsApsGps(5m) |
| | | CpsGpsApsmoeApsmoeGpslnTpsmoeGpsmoe(5m)C |
| ASO-808 | 829 | moeGpsmoe(5m)CpslnApsmoeGpsmoeApsmXpsGpsTpsGpsApsApsGps(5m) |
| | | CpsGpsApsmoeApsmoeGpsmoeTpslnGpsmoe(5m)C |
| ASO-809 | 830 | moeGpsmoe(5m)CpslnApsmoeGpsmoeApsmXpsGpsTpsGpsApsApsGps(5m) |
| | | CpsGpsApsmoeApsmoeGpsmoeTpsmoeGpsln(5m)C |
| ASO-810 | 831 | moeGpsmoe(5m)CpsmoeApslnGpslnApsmXpsGpsTpsGpsApsApsGps(5m) |
| | | CpsGpsApsmoeApsmoeGpsmoeTpsmoeGpsmoe(5m)C |
| ASO-811 | 832 | moeGpsmoe(5m)CpsmoeApslnGpsmoeApsmXpsGpsTpsGpsApsApsGps(5m) |
| | | CpsGpsApslnApsmoeGpsmoeTpsmoeGpsmoe(5m)C |
| ASO-812 | 833 | moeGpsmoe(5m)CpsmoeApslnGpsmoeApsmXpsGpsTpsGpsApsApsGps(5m) |
| | | CpsGpsApsmoeApslnGpsmoeTpsmoeGpsmoe(5m)C |
| ASO-813 | 834 | moeGpsmoe(5m)CpsmoeApslnGpsmoeApsmXpsGpsTpsGpsApsApsGps(5m) |
| | | CpsGpsApsmoeApsmoeGpslnTpsmoeGpsmoe(5m)C |
| ASO-814 | 835 | moeGpsmoe(5m)CpsmoeApslnGpsmoeApsmXpsGpsTpsGpsApsApsGps(5m) |
| | | CpsGpsApsmoeApsmoeGpsmoeTpslnGpsmoe(5m)C |
| ASO-815 | 836 | moeGpsmoe(5m)CpsmoeApslnGpsmoeApsmXpsGpsTpsGpsApsApsGps(5m) |
| | | CpsGpsApsmoeApsmoeGpsmoeTpsmoeGpsln(5m)C |
| ASO-816 | 837 | moeGpsmoe(5m)CpsmoeApsmoeGpslnApsmXpsGpsTpsGpsApsApsGps(5m) |
| | | CpsGpsApslnApsmoeGpsmoeTpsmoeGpsmoe(5m)C |
| ASO-817 | 838 | moeGpsmoe(5m)CpsmoeApsmoeGpslnApsmXpsGpsTpsGpsApsApsGps(5m) |
| | | CpsGpsApsmoeApslnGpsmoeTpsmoeGpsmoe(5m)C |
| ASO-818 | 839 | moeGpsmoe(5m)CpsmoeApsmoeGpslnApsmXpsGpsTpsGpsApsApsGps(5m) |
| | | CpsGpsApsmoeApsmoeGpslnTpsmoeGpsmoe(5m)C |
| ASO-819 | 840 | moeGpsmoe(5m)CpsmoeApsmoeGpslnApsmXpsGpsTpsGpsApsApsGps(5m) |
| | | CpsGpsApsmoeApsmoeGpsmoeTpslnGpsmoe(5m)C |
| ASO-820 | 841 | moeGpsmoe(5m)CpsmoeApsmoeGpslnApsmXpsGpsTpsGpsApsApsGps(5m) |
| | | CpsGpsApsmoeApsmoeGpsmoeTpsmoeGpsln(5m)C |
| ASO-821 | 842 | moeGpsmoe(5m)CpsmoeApsmoeGpsmoeApsmXpsGpsTpsGpsApsApsGps |
| | | (5m)CpsGpsApslnApslnGpsmoeTpsmoeGpsmoe(5m)C |
| ASO-822 | 843 | moeGpsmoe(5m)CpsmoeApsmoeGpsmoeApsmXpsGpsTpsGpsApsApsGps |
| | | (5m)CpsGpsApslnApsmoeGpslnTpsmoeGpsmoe(5m)C |
| ASO-823 | 844 | moeGpsmoe(5m)CpsmoeApsmoeGpsmoeApsmXpsGpsTpsGpsApsApsGps |
| | | (5m)CpsGpsApslnApsmoeGpsmoeTpslnGpsmoe(5m)C |
| ASO-824 | 845 | moeGpsmoe(5m)CpsmoeApsmoeGpsmoeApsmXpsGpsTpsGpsApsApsGps |
| | | (5m)CpsGpsApslnApsmoeGpsmoeTpsmoeGpsln(5m)C |
| ASO-825 | 846 | moeGpsmoe(5m)CpsmoeApsmoeGpsmoeApsmXpsGpsTpsGpsApsApsGps |
| | | (5m)CpsGpsApsmoeApslnGpslnTpsmoeGpsmoe(5m)C |
| ASO-826 | 847 | moeGpsmoe(5m)CpsmoeApsmoeGpsmoeApsmXpsGpsTpsGpsApsApsGps |
| | | (5m)CpsGpsApsmoeApslnGpsmoeTpslnGpsmoe(5m)C |
| ASO-827 | 848 | moeGpsmoe(5m)CpsmoeApsmoeGpsmoeApsmXpsGpsTpsGpsApsApsGps |
| | | (5m)CpsGpsApsmoeApslnGpsmoeTpsmoeGpsln(5m)C |
| ASO-828 | 849 | moeGpsmoe(5m)CpsmoeApsmoeGpsmoeApsmXpsGpsTpsGpsApsApsGps |
| | | (5m)CpsGpsApsmoeApsmoeGpslnTpslnGpsmoe(5m)C |
| ASO-829 | 850 | moeGpsmoe(5m)CpsmoeApsmoeGpsmoeApsmXpsGpsTpsGpsApsApsGps |
| | | (5m)CpsGpsApsmoeApsmoeGpslnTpsmoeGpsln(5m)C |
| ASO-830 | 851 | moeGpsmoe(5m)CpsmoeApsmoeGpsmoeApsmXpsGpsTpsGpsApsApsGps |
| | | (5m)CpsGpsApsmoeApsmoeGpsmoeTpslnGpsln(5m)C |
| ASO-831 | 852 | moe(5m)CpsmoeApsgutbGpsmoeApsmoeGpsGpsTpsGpsApsApsGps(5m)Cps |
| | | GpsApsApsmoeGpsmoeTpsgutbGpsmoe(5m)CpsmoeA |
| ASO-832 | 853 | GpsGpsTpsGpsApsApsGps(5m)CpsGpsApsmoeApsmoeGpsmoeTpsmoeGps |
| | | moe(5m)CpsmoeApsmoe(5m)CpsmoeApsmoeApsmoeGpsmoeA |
| ASO-833 | 854 | moeApsGpsGpsTpsGpsApsApsGps(5m)CpsGpsApsmoeApsmoeGpsmoeTps |
| | | moeGpsmoe(5m)CpsmoeApsmoe(5m)CpsmoeApsmoeApsmoeG |
| ASO-834 | 855 | moeGpsmoeApsGpsGpsTpsGpsApsApsGps(5m)CpsGpsApsmoeApsmoeGps |
| | | moeTpsmoeGpsmoe(5m)CpsmoeApsmoe(5m)CpsmoeApsmoeA |
| ASO-835 | 856 | moeApsmoeGpsmoeApsGpsGpsTpsGpsApsApsGps(5m)CpsGpsApsmoeAps |
| | | moeGpsmoeTpsmoeGpsmoe(5m)CpsmoeApsmoe(5m)CpsmoeA |
| ASO-836 | 857 | moe(5m)CpsmoeApsmoeGpsmoeApsGpsGpsTpsGpsApsApsGps(5m)CpsGps |
| | | ApsmoeApsmoeGpsmoeTpsmoeGpsmoe(5m)CpsmoeApsmoe(5m)C |
| ASO-837 | 858 | moeGpsmoeTpsmoeGpsmoe(5m)CpsmoeApsmoeGpsmoeApsGpsGpsTpsGps |
| | | ApsApsGps(5m)CpsGpsApsmoeApsmoeGpsmoeTpsmoeG |
| ASO-838 | 859 | moe(5m)CpsmoeGpsmoeTpsmoeGpsmoe(5m)CpsmoeApsmoeGpsmoeAps |
| | | GpsGpsTpsGpsApsApsGps(5m)CpsGpsApsmoeApsmoeGpsmoeT |
| ASO-839 | 860 | moeApsmoe(5m)CpsmoeGpsmoeTpsmoeGpsmoe(5m)CpsmoeApsmoeGps |
| | | moeApsGpsGpsTpsGpsApsApsGps(5m)CpsGpsApsmoeApsmoeG |
| ASO-840 | 861 | GpsGpsTpsGpsmoeApsApsGps(5m)CpsGpsApsmoeApsmoeGpsmoeTpsmoe |
| | | Gpsmoe(5m)CpsmoeApsmoe(5m)CpsmoeApsmoeApsmoeGpsmoeA |
| ASO-841 | 862 | moeApsGpsGpsTpsGpsmoeApsApsGps(5m)CpsGpsApsmoeApsmoeGpsmoe |
| | | TpsmoeGpsmoe(5m)CpsmoeApsmoe(5m)CpsmoeApsmoeApsmoeG |
| ASO-842 | 863 | moeGpsmoeApsGpsGpsTpsGpsmoeApsApsGps(5m)CpsGpsApsmoeApsmoe |
| | | GpsmoeTpsmoeGpsmoe(5m)CpsmoeApsmoe(5m)CpsmoeApsmoeA |
| ASO-843 | 864 | moeApsmoeGpsmoeApsGpsGpsTpsGpsmoeApsApsGps(5m)CpsGpsApsmoe |
| | | ApsmoeGpsmoeTpsmoeGpsmoe(5m)CpsmoeApsmoe(5m)CpsmoeA |
| ASO-844 | 865 | moe(5m)CpsmoeApsmoeGpsmoeApsGpsGpsTpsGpsmoeApsApsGps(5m)Cps |
| | | GpsApsmoeApsmoeGpsmoeTpsmoeGpsmoe(5m)CpsmoeApsmoe(5m)C |
| ASO-845 | 866 | moeGpsmoe(5m)CpsmoeApsmoeGpsmoeApsGpsGpsTpsGpsmoeApsApsGps |
| | | (5m)CpsGpsApsmoeApsmoeGpsmoeTpsmoeGpsmoe(5m)CpsmoeA |
| ASO-846 | 867 | moeTpsmoeGpsmoe(5m)CpsmoeApsmoeGpsmoeApsGpsGpsTpsGpsmoeAps |
| | | ApsGps(5m)CpsGpsApsmoeApsmoeGpsmoeTpsmoeGpsmoe(5m)C |
| ASO-847 | 868 | moeGpsmoeTpsmoeGpsmoe(5m)CpsmoeApsmoeGpsmoeApsGpsGpsTpsGps |
| | | moeApsApsGps(5m)CpsGpsApsmoeApsmoeGpsmoeTpsmoeG |
| ASO-848 | 869 | moe(5m)CpsmoeGpsmoeTpsmoeGpsmoe(5m)CpsmoeApsmoeGpsmoeApsGps |
| | | GpsTpsGpsmoeApsApsGps(5m)CpsGpsApsmoeApsmoeGpsmoeT |
| ASO-849 | 870 | moeApsmoe(5m)CpsmoeGpsmoeTpsmoeGpsmoe(5m)CpsmoeApsmoeGpsmoe |
| | | ApsGpsGpsTpsGpsmoeApsApsGps(5m)CpsGpsApsmoeApsmoeG |
| ASO-850 | 871 | moe(5m)CpsmoeApsmoeGpsmoeApsmoeGpsGpsTpsGpsApsApsGps(5m)Cps |
| | | GpsApsApsmoeGpsmoeTpsmoeGpsmoe(5m)CpsmoeApsmoe(5m)C |
| ASO-851 | 872 | moe(5m)CpsmoeApsmoeGpsmoeApsmoeGpsGpsTpsGpsApsApsGps(5m)Cps |
| | | GpsApsmoeApsmoeGpsmoeTpsmoeGpsmoe(5m)CpsmoeApsmoe(5m)C |
| ASO-852 | 873 | moe(5m)CpsmoeApsmoeGpsmoeApsmoeGpsmoeGpsTpsGpsApsApsGps(5m) |
| | | CpsGpsApsApsGpsmoeTpsmoeGpsmoe(5m)CpsmoeApsmoe(5m)C |
| ASO-853 | 874 | moe(5m)CpsmoeApsmoeGpsmoeApsGpsGpsTpsGpsApsApsGps(5m)CpsGps |
| | | moeApsmoeApsmoeGpsmoeTpsmoeGpsmoe(5m)CpsmoeApsmoe(5m)C |
| ASO-854 | 875 | moe(5m)CpsmoeApsmoeGpsmoeApsmoeGpsmoeGpsmoeTpsGpsApsApsGps |
| | | (5m)CpsGpsApsApsGpsTpsmoeGpsmoe(5m)CpsmoeApsmoe(5m)C |
| ASO-855 | 876 | moe(5m)CpsmoeApsmoeGpsmoeApsmoeGpsmoeGpsTpsGpsApsApsGps(5m) |
| | | CpsGpsApsApsmoeGpsmoeTpsmoeGpsmoe(5m)CpsmoeApsmoe(5m)C |
| ASO-856 | 877 | moe(5m)CpsmoeApsmoeGpsmoeApsmoeGpsmoeGpsmoeTpsGpsApsApsGps |
| | | (5m)CpsGpsApsApsGpsmoeTpsmoeGpsmoe(5m)CpsmoeApsmoe(5m)C |
| ASO-857 | 878 | moe(5m)CpsmoeApsmoeGpsmoeApsmoeGpsmoeGpsmoeTpsmoeGpsApsAps |
| | | Gps(5m)CpsGpsApsApsGpsTpsmoeGpsmoe(5m)CpsmoeApsmoe(5m)C |
| ASO-858 | 879 | moe(5m)CpsmoeApsmoeGpsmoeApsmoeGpsmoeGpsTpsGpsApsApsGps(5m) |
| | | CpsGpsApsmoeApsmoeGpsmoeTpsmoeGpsmoe(5m)CpsmoeApsmoe(5m)C |
| ASO-859 | 880 | moe(5m)CpsmoeApsmoeGpsmoeApsmoeGpsmoeGpsmoeTpsGpsApsApsGps |
| | | (5m)CpsGpsApsApsmoeGpsmoeTpsmoeGpsmoe(5m)CpsmoeApsmoe(5m)C |
| ASO-860 | 881 | moe(5m)CpsmoeApsmoeGpsmoeApsmoeGpsGpsTpsGpsApsApsGps(5m)Cps |
| | | GpsApsApsGpsmoeTpsmoeGpsmoe(5m)CpsmoeApsmoe(5m)C |
| ASO-861 | 882 | moe(5m)CpsmoeApslnGpsmoeApsmoeGpsGpsTpsGps5ocpApsApsGps(5m) |
| | | CpsGpsApsApsmoeGpsmoeTpslnGpsmoe(5m)CpsmoeA |
| ASO-862 | 883 | moe(5m)CpsmoeApslnGpsmoeApsmoeGpsGpsTpsGps5ocpApsApsGps(5m) |
| | | CpsGpsApsApsmoeGpsmoeTpslnGpsmoe(5m)CpsmoeA |
| ASO-863 | 884 | moe(5m)CpsmoeApslnGpsmoeApsmoeGpsGpsTpsGps5omcpApsApsGps(5m) |
| | | CpsGpsApsApsmoeGpsmoeTpslnGpsmoe(5m)CpsmoeA |
| ASO-864 | 885 | moe(5m)CpsmoeApslnGpsmoeApsmoeGpsGpsTpsGps5omcpApsApsGps(5m) |
| | | CpsGpsApsApsmoeGpsmoeTpslnGpsmoe(5m)CpsmoeA |
| ASO-865 | 886 | moe(5m)CpsmoeApslnGpsmoeApsmoeGpsGpsTpsGpsAps5ocpApsGps(5m) |
| | | CpsGpsApsApsmoeGpsmoeTpslnGpsmoe(5m)CpsmoeA |
| ASO-866 | 887 | moe(5m)CpsmoeApslnGpsmoeApsmoeGpsGpsTpsGpsAps5ocpApsGps(5m) |
| | | CpsGpsApsApsmoeGpsmoeTpslnGpsmoe(5m)CpsmoeA |
| ASO-867 | 888 | moe(5m)CpsmoeApslnGpsmoeApsmoeGpsGpsTpsGpsAps5omcpApsGps(5m) |
| | | CpsGpsApsApsmoeGpsmoeTpslnGpsmoe(5m)CpsmoeA |
| ASO-868 | 889 | moe(5m)CpsmoeApslnGpsmoeApsmoeGpsGpsTpsGpsAps5omcpApsGps(5m) |
| | | CpsGpsApsApsmoeGpsmoeTpslnGpsmoe(5m)CpsmoeA |
| ASO-869 | 890 | moe(5m)CpsmoeApslnGpsmoeApsmoeGpsGpsTpsGpsApsAps5ocpGps(5m) |
| | | CpsGpsApsApsmoeGpsmoeTpslnGpsmoe(5m)CpsmoeA |
| ASO-870 | 891 | moe(5m)CpsmoeApslnGpsmoeApsmoeGpsGpsTpsGpsApsAps5omcpGps(5m) |
| | | CpsGpsApsApsmoeGpsmoeTpslnGpsmoe(5m)CpsmoeA |
| ASO-871 | 892 | moe(5m)CpsmoeApslnGpsmoeApsmoeGpsGpsTpsGpsApsApsGps(5m)Cps |
| | | 5ocpGpsApsApsmoeGpsmoeTpslnGpsmoe(5m)CpsmoeA |
| ASO-872 | 893 | moe(5m)CpsmoeApslnGpsmoeApsmoeGpsGpsTpsGpsApsApsGps(5m)Cps |
| | | 5omcpGpsApsApsmoeGpsmoeTpslnGpsmoe(5m)CpsmoeA |
| ASO-873 | 894 | moe(5m)CpsmoeApslnGpsmoeApsmoeGpsGpsTpsGpsApsApsGps(5m)Cps |
| | | Gps5ocpApsApsmoeGpsmoeTpslnGpsmoe(5m)CpsmoeA |
| ASO-874 | 895 | moe(5m)CpsmoeApslnGpsmoeApsmoeGpsGpsTpsGpsApsApsGps(5m)Cps |
| | | Gps5ocpApsApsmoeGpsmoeTpslnGpsmoe(5m)CpsmoeA |
| ASO-875 | 896 | moe(5m)CpsmoeApslnGpsmoeApsmoeGpsGpsTpsGpsApsApsGps(5m)Cps |
| | | Gps5omcpApsApsmoeGpsmoeTpslnGpsmoe(5m)CpsmoeA |
| ASO-876 | 897 | moe(5m)CpsmoeApslnGpsmoeApsmoeGpsGpsTpsGpsApsApsGps(5m)Cps |
| | | Gps5omcpApsApsmoeGpsmoeTpslnGpsmoe(5m)CpsmoeA |
| ASO-877 | 898 | moe(5m)CpsmoeApslnGpsmoeApsmoeGpsGpsTpsGpsApsApsGps(5m)Cps |
| | | GpsAps5ocpApsmoeGpsmoeTpslnGpsmoe(5m)CpsmoeA |
| ASO-878 | 899 | moe(5m)CpsmoeApslnGpsmoeApsmoeGpsGpsTpsGpsApsApsGps(5m)Cps |
| | | GpsAps5ocpApsmoeGpsmoeTpslnGpsmoe(5m)CpsmoeA |
| ASO-879 | 900 | moe(5m)CpsmoeApslnGpsmoeApsmoeGpsGpsTpsGpsApsApsGps(5m)Cps |
| | | GpsAps5omcpApsmoeGpsmoeTpslnGpsmoe(5m)CpsmoeA |
| ASO-880 | 901 | moe(5m)CpsmoeApslnGpsmoeApsmoeGpsGpsTpsGpsApsApsGps(5m)Cps |
| | | GpsAps5omcpApsmoeGpsmoeTpslnGpsmoe(5m)CpsmoeA |
| ASO-881 | 902 | moeGpsmoe(5m)CpsmoeApsmoeGpsmoeApsGpsGpsTpsGpsApsApsGps(5m) |
| | | CpsGpsGpsmoeApsmoeGpsmoeTpsmoeGpsmoe(5m)C |
| ASO-882 | 903 | moeGpsmoe(5m)CpsmoeApsmoeGpsmoeApsGpsGpsTpsGpsApsApsGps(5m) |
| | | CpsGpsTpsmoeApsmoeGpsmoeTpsmoeGpsmoe(5m)C |
| ASO-883 | 904 | moeGpsmoe(5m)CpsmoeApsmoeGpsmoeApsGpsGpsTpsGpsApsApsGps(5m) |
| | | CpsGps(5m)CpsmoeApsmoeGpsmoeTpsmoeGpsmoe(5m)C |
| ASO-884 | 905 | moeGpsmoe(5m)CpsmoeApsmoeGpsmoeApsGpsGpsTpsGpsApsApsGps(5m) |
| | | CpsApsApsmoeApsmoeGpsmoeTpsmoeGpsmoe(5m)C |
| ASO-885 | 906 | moeGpsmoe(5m)CpsmoeApsmoeGpsmoeApsGpsGpsTpsGpsApsApsGps(5m) |
| | | CpsTpsApsmoeApsmoeGpsmoeTpsmoeGpsmoe(5m)C |
| ASO-886 | 907 | moeGpsmoe(5m)CpsmoeApsmoeGpsmoeApsGpsGpsTpsGpsApsApsGps(5m) |
| | | Cps(5m)CpsApsmoeApsmoeGpsmoeTpsmoeGpsmoe(5m)C |
| ASO-887 | 908 | moeGpsmoe(5m)CpsmoeApsmoeGpsmoeApsGpsGpsTpsGpsApsApsGpsAps |
| | | GpsApsmoeApsmoeGpsmoeTpsmoeGpsmoe(5m)C |
| ASO-888 | 909 | moeGpsmoe(5m)CpsmoeApsmoeGpsmoeApsGpsGpsTpsGpsApsApsGpsTps |
| | | GpsApsmoeApsmoeGpsmoeTpsmoeGpsmoe(5m)C |
| ASO-889 | 910 | moeGpsmoe(5m)CpsmoeApsmoeGpsmoeApsGpsGpsTpsGpsApsApsGpsGps |
| | | GpsApsmoeApsmoeGpsmoeTpsmoeGpsmoe(5m)C |
| ASO-890 | 911 | moeGpsmoe(5m)CpsmoeApsmoeGpsmoeApsGpsGpsTpsGpsApsApsGps(5m) |
| | | CpsGpsApsmXpsmoeGpsmoeTpsmoeGpsmoe(5m)C |
| ASO-891 | 912 | moeGpsmoe(5m)CpsmoeApsmoeGpsmoeApsGpsGpsTpsGpsApsApsGps(5m) |
| | | CpsGpsApsmoeApsmXpsmoeTpsmoeGpsmoe(5m)C |
| ASO-892 | 913 | moeGpsmoe(5m)CpsmoeApsmoeGpsmoeApsGpsGpsTpsGpsApsApsGps(5m) |
| | | CpsGpsApsmoeApsmoeGpsmXpsmoeGpsmoe(5m)C |
| ASO-893 | 914 | moeGpsmoe(5m)CpsmoeApsmoeGpsmoeApsGpsGpsTpsGpsApsApsGps(5m) |
| | | CpsGpsApsmoeApsmoeGpsmoeTpsmoeGpsmX |
| ASO-894 | 915 | ApsGpsGpsTpsGpsmoeApsApsGps(5m)CpsGpsApsmoeApsmoeGpsmoeTps |
| | | moeGpsmoe(5m)CpsmoeApsmoe(5m)CpsmoeApsmoe(5m)CpsmoeG |
| ASO-895 | 916 | moeGpsApsGpsGpsTpsGpsmoeApsApsGps(5m)CpsGpsApsmoeApsmoeGps |
| | | moeTpsmoeGpsmoe(5m)CpsmoeApsmoe(5m)CpsmoeApsmoe(5m)C |
| ASO-896 | 917 | moeApsmoeGpsApsGpsGpsTpsGpsmoeApsApsGps(5m)CpsGpsApsmoeAps |
| | | moeGpsmoeTpsmoeGpsmoe(5m)CpsmoeApsmoe(5m)CpsmoeA |
| ASO-897 | 918 | moe(5m)CpsmoeApsmoeGpsApsGpsGpsTpsGpsmoeApsApsGps(5m)CpsGps |
| | | ApsmoeApsmoeGpsmoeTpsmoeGpsmoe(5m)CpsmoeApsmoe(5m)C |
| ASO-898 | 919 | moeGpsmoe(5m)CpsmoeApsmoeGpsApsGpsGpsTpsGpsmoeApsApsGps(5m) |
| | | CpsGpsApsmoeApsmoeGpsmoeTpsmoeGpsmoe(5m)CpsmoeA |
| ASO-899 | 920 | moeTpsmoeGpsmoe(5m)CpsmoeApsmoeGpsApsGpsGpsTpsGpsmoeApsAps |
| | | Gps(5m)CpsGpsApsmoeApsmoeGpsmoeTpsmoeGpsmoe(5m)C |
| ASO-900 | 921 | moeGpsmoeTpsmoeGpsmoe(5m)CpsmoeApsmoeGpsApsGpsGpsTpsGpsmoe |
| | | ApsApsGps(5m)CpsGpsApsmoeApsmoeGpsmoeTpsmoeG |
| ASO-901 | 922 | moe(5m)CpsmoeGpsmoeTpsmoeGpsmoe(5m)CpsmoeApsmoeGpsApsGpsGps |
| | | TpsGpsmoeApsApsGps(5m)CpsGpsApsmoeApsmoeGpsmoeT |
| ASO-902 | 923 | moeApsmoe(5m)CpsmoeGpsmoeTpsmoeGpsmoe(5m)CpsmoeApsmoeGpsAps |
| | | GpsGpsTpsGpsmoeApsApsGps(5m)CpsGpsApsmoeApsmoeG |
| ASO-903 | 924 | ApsGpsGpsTpsGpsApsApsGps(5m)CpsGpsApsmoeApsmoeGpsmoeTpsmoe |
| | | Gpsmoe(5m)CpsmoeApsmoe(5m)CpsmoeApsmoe(5m)CpsmoeG |
| ASO-904 | 925 | moeGpsApsGpsGpsTpsGpsApsApsGps(5m)CpsGpsApsmoeApsmoeGpsmoe |
| | | TpsmoeGpsmoe(5m)CpsmoeApsmoe(5m)CpsmoeApsmoe(5m)C |
| ASO-905 | 926 | moeApsmoeGpsApsGpsGpsTpsGpsApsApsGps(5m)CpsGpsApsmoeApsmoe |
| | | GpsmoeTpsmoeGpsmoe(5m)CpsmoeApsmoe(5m)CpsmoeA |
| ASO-906 | 927 | moe(5m)CpsmoeApsmoeGpsApsGpsGpsTpsGpsApsApsGps(5m)CpsGpsAps |
| | | moeApsmoeGpsmoeTpsmoeGpsmoe(5m)CpsmoeApsmoe(5m)C |
| ASO-907 | 928 | moeGpsmoe(5m)CpsmoeApsmoeGpsApsGpsGpsTpsGpsApsApsGps(5m)Cps |
| | | GpsApsmoeApsmoeGpsmoeTpsmoeGpsmoe(5m)CpsmoeA |
| ASO-908 | 929 | moeTpsmoeGpsmoe(5m)CpsmoeApsmoeGpsApsGpsGpsTpsGpsApsApsGps |
| | | (5m)CpsGpsApsmoeApsmoeGpsmoeTpsmoeGpsmoe(5m)C |
| ASO-909 | 930 | moeGpsmoeTpsmoeGpsmoe(5m)CpsmoeApsmoeGpsApsGpsGpsTpsGpsAps |
| | | ApsGps(5m)CpsGpsApsmoeApsmoeGpsmoeTpsmoeG |
| ASO-910 | 931 | moe(5m)CpsmoeGpsmoeTpsmoeGpsmoe(5m)CpsmoeApsmoeGpsApsGpsGps |
| | | TpsGpsApsApsGps(5m)CpsGpsApsmoeApsmoeGpsmoeT |
| ASO-911 | 932 | moeApsmoe(5m)CpsmoeGpsmoeTpsmoeGpsmoe(5m)CpsmoeApsmoeGpsAps |
| | | GpsGpsTpsGpsApsApsGps(5m)CpsGpsApsmoeApsmoeG |
| ASO-912 | 933 | lnXpsmoe(5m)CpsmoeApsmoeGpsmoeApsGpsGpsTpsGpsApsApsGps(5m) |
| | | CpsGpsApsmoeApsmoeGpsmoeTpsmoeGpsmoe(5m)C |
| ASO-913 | 934 | moeGpslnXpsmoeApsmoeGpsmoeApsGpsGpsTpsGpsApsApsGps(5m)Cps |
| | | GpsApsmoeApsmoeGpsmoeTpsmoeGpsmoe(5m)C |
| ASO-914 | 935 | moeGpsmoe(5m)CpslnXpsmoeGpsmoeApsGpsGpsTpsGpsApsApsGps(5m) |
| | | CpsGpsApsmoeApsmoeGpsmoeTpsmoeGpsmoe(5m)C |
| ASO-915 | 936 | moeGpsmoe(5m)CpsmoeApslnXpsmoeApsGpsGpsTpsGpsApsApsGps(5m) |
| | | CpsGpsApsmoeApsmoeGpsmoeTpsmoeGpsmoe(5m)C |
| ASO-916 | 937 | moeGpsmoe(5m)CpsmoeApsmoeGpslnXpsGpsGpsTpsGpsApsApsGps(5m) |
| | | CpsGpsApsmoeApsmoeGpsmoeTpsmoeGpsmoe(5m)C |
| ASO-917 | 938 | moeGpsmoe(5m)CpsmoeApsmoeGpsmoeApsGpsGpsTpsGpsApsApsGps(5m) |
| | | CpsGpsApslnXpsmoeGpsmoeTpsmoeGpsmoe(5m)C |
| ASO-918 | 939 | moeGpsmoe(5m)CpsmoeApsmoeGpsmoeApsGpsGpsTpsGpsApsApsGps(5m) |
| | | CpsGpsApsmoeApslnXpsmoeTpsmoeGpsmoe(5m)C |
| ASO-919 | 940 | moeGpsmoe(5m)CpsmoeApsmoeGpsmoeApsGpsGpsTpsGpsApsApsGps(5m) |
| | | CpsGpsApsmoeApsmoeGpslnXpsmoeGpsmoe(5m)C |
| ASO-920 | 941 | moeGpsmoe(5m)CpsmoeApsmoeGpsmoeApsGpsGpsTpsGpsApsApsGps(5m) |
| | | CpsGpsApsmoeApsmoeGpsmoeTpslnXpsmoe(5m)C |
| ASO-921 | 942 | moeGpsmoe(5m)CpsmoeApsmoeGpsmoeApsGpsGpsTpsGpsApsApsGps(5m) |
| | | CpsGpsApsmoeApsmoeGpsmoeTpsmoeGpslnX |
| ASO-922 | 943 | moeXpsmoe(5m)CpsmoeApsmoeGpsmoeApsGpsGpsTpsGpsApsApsGps(5m) |
| | | CpsGpsApsmoeApsmoeGpsmoeTpsmoeGpsmoe(5m)C |
| ASO-923 | 944 | moeGpsmoeXpsmoeApsmoeGpsmoeApsGpsGpsTpsGpsApsApsGps(5m)Cps |
| | | GpsApsmoeApsmoeGpsmoeTpsmoeGpsmoe(5m)C |
| ASO-924 | 945 | moeGpsmoe(5m)CpsmoeXpsmoeGpsmoeApsGpsGpsTpsGpsApsApsGps(5m) |
| | | CpsGpsApsmoeApsmoeGpsmoeTpsmoeGpsmoe(5m)C |
| ASO-925 | 946 | moeGpsmoe(5m)CpsmoeApsmoeXpsmoeApsGpsGpsTpsGpsApsApsGps(5m) |
| | | CpsGpsApsmoeApsmoeGpsmoeTpsmoeGpsmoe(5m)C |
| ASO-926 | 947 | moeGpsmoe(5m)CpsmoeApsmoeGpsmoeXpsGpsGpsTpsGpsApsApsGps(5m) |
| | | CpsGpsApsmoeApsmoeGpsmoeTpsmoeGpsmoe(5m)C |
| ASO-927 | 948 | moeGpsmoe(5m)CpsmoeApsmoeGpsmoeApsGpsGpsTpsGpsApsApsGps(5m) |
| | | CpsGpsApsmoeXpsmoeGpsmoeTpsmoeGpsmoe(5m)C |
| ASO-928 | 949 | moeGpsmoe(5m)CpsmoeApsmoeGpsmoeApsGpsGpsTpsGpsApsApsGps(5m) |
| | | CpsGpsApsmoeApsmoeXpsmoeTpsmoeGpsmoe(5m)C |
| ASO-929 | 950 | moeGpsmoe(5m)CpsmoeApsmoeGpsmoeApsGpsGpsTpsGpsApsApsGps(5m) |
| | | CpsGpsApsmoeApsmoeGpsmoeXpsmoeGpsmoe(5m)C |
| ASO-930 | 951 | moeGpsmoe(5m)CpsmoeApsmoeGpsmoeApsGpsGpsTpsGpsApsApsGps(5m) |
| | | CpsGpsApsmoeApsmoeGpsmoeTpsmoeXpsmoe(5m)C |
| ASO-931 | 952 | moeGpsmoe(5m)CpsmoeApsmoeGpsmoeApsGpsGpsTpsGpsApsApsGps(5m) |
| | | CpsGpsApsmoeApsmoeGpsmoeTpsmoeGpsmoeX |
| ASO-932 | 953 | moeGpsmoe(5m)CpsmoeApsmoeGpsApsGpsGpsTpsGpsmoeXpsApsGps(5m) |
| | | CpsGpsApsmoeApslnGpsmoeTpslnGpsln(5m)C |
| ASO-933 | 954 | moeGpsmoe(5m)CpsmoeApsmoeGpsApsGpsGpsTpsGpslnXpsApsGps(5m) |
| | | CpsGpsApsmoeApslnGpsmoeTpslnGpsln(5m)C |
| ASO-934 | 955 | moeGpsmoe(5m)CpslnApsmoeGpslnApsGpsGpsTpsGpsApsAps(5m)Cps(5m) |
| | | CpsGpsApsmoeApsmoeGpsmoeTpsmoeGpsmoe(5m)C |
| ASO-935 | 956 | moeGpsmoe(5m)CpsmoeApslnGpslnApsGpsGpsTpsGpsApsAps(5m)Cps(5m) |
| | | CpsGpsApsmoeApsmoeGpsmoeTpsmoeGpsmoe(5m)C |
| ASO-936 | 957 | moeGpsmoe(5m)CpsmoeApslnGpsmoeApsGpsGpsTpsGpsApsAps(5m)Cps |
| | | (5m)CpsGpsApslnApsmoeGpsmoeTpsmoeGpsmoe(5m)C |
| ASO-937 | 958 | moeGpsmoe(5m)CpsmoeApsmoeGpslnApsGpsGpsTpsGpsApsAps(5m)Cps |
| | | (5m)CpsGpsApslnApsmoeGpsmoeTpsmoeGpsmoe(5m)C |
| ASO-938 | 959 | moeGpsmoe(5m)CpsmoeApsmoeGpslnApsGpsGpsTpsGpsApsAps(5m)Cps |
| | | (5m)CpsGpsApsmoeApsmoeGpsmoeTpslnGpsmoe(5m)C |
| ASO-939 | 960 | moeGpsmoe(5m)CpsmoeApsmoeGpsmoeApsGpsGpsTpsGpsApsAps(5m)Cps |
| | | (5m)CpsGpsApslnApsmoeGpslnTpsmoeGpsmoe(5m)C |
| ASO-940 | 961 | moeGpsmoe(5m)CpslnApsmoeGpslnApsGpsGpsTpsGpsApsApsTps(5m)Cps |
| | | GpsApsmoeApsmoeGpsmoeTpsmoeGpsmoe(5m)C |
| ASO-941 | 962 | moeGpsmoe(5m)CpsmoeApslnGpslnApsGpsGpsTpsGpsApsApsTps(5m)Cps |
| | | GpsApsmoeApsmoeGpsmoeTpsmoeGpsmoe(5m)C |
| ASO-942 | 963 | moeGpsmoe(5m)CpsmoeApslnGpsmoeApsGpsGpsTpsGpsApsApsTps(5m) |
| | | CpsGpsApslnApsmoeGpsmoeTpsmoeGpsmoe(5m)C |
| ASO-943 | 964 | moeGpsmoe(5m)CpsmoeApsmoeGpslnApsGpsGpsTpsGpsApsApsTps(5m) |
| | | CpsGpsApslnApsmoeGpsmoeTpsmoeGpsmoe(5m)C |
| ASO-944 | 965 | moeGpsmoe(5m)CpsmoeApsmoeGpslnApsGpsGpsTpsGpsApsApsTps(5m) |
| | | CpsGpsApsmoeApsmoeGpsmoeTpslnGpsmoe(5m)C |
| ASO-945 | 966 | moeGpsmoe(5m)CpsmoeApsmoeGpsmoeApsGpsGpsTpsGpsApsApsTps(5m) |
| | | CpsGpsApslnApsmoeGpslnTpsmoeGpsmoe(5m)C |
| ASO-946 | 967 | moeGpsmoe(5m)CpsmoeApsmoeGpslnApsGpsGpsTps(5m)CpsApsApsGps |
| | | (5m)CpsGpsApsmoeApsmoeGpsmoeTpsmoeGpsmoe(5m)C |
| ASO-947 | 968 | moeGpsmoe(5m)CpsmoeApsmoeGpsmoeApsGpsGpsTps(5m)CpsApsApsGps |
| | | (5m)CpsGpsApsmoeApslnGpsmoeTpsmoeGpsmoe(5m)C |
| ASO-948 | 969 | moeGpsmoe(5m)CpsmoeApsmoeGpslnApsGpsGpsTpsGpsGpsApsGps(5m) |
| | | CpsGpsApsmoeApsmoeGpsmoeTpsmoeGpsmoe(5m)C |
| ASO-949 | 970 | moeGpsmoe(5m)CpsmoeApsmoeGpsmoeApsGpsGpsTpsGpsGpsApsGps(5m) |
| | | CpsGpsApsmoeApslnGpsmoeTpsmoeGpsmoe(5m)C |
| ASO-950 | 971 | moeGpsmoe(5m)CpsmoeApsmoeGpslnApsGpsGpsTpsGpsApsTpsGps(5m) |
| | | CpsGpsApsmoeApsmoeGpsmoeTpsmoeGpsmoe(5m)C |
| ASO-951 | 972 | moeGpsmoe(5m)CpsmoeApsmoeGpsmoeApsGpsGpsTpsGpsApsTpsGps(5m) |
| | | CpsGpsApsmoeApslnGpsmoeTpsmoeGpsmoe(5m)C |
| ASO-952 | 973 | moeGpsmoe(5m)CpsmoeApsmoeGpslnApsGpsGpsTpsGpsApsAps(5m)Cps |
| | | (5m)CpsGpsApsmoeApsmoeGpsmoeTpsmoeGpsmoe(5m)C |
| ASO-953 | 974 | moeGpsmoe(5m)CpsmoeApsmoeGpsmoeApsGpsGpsTpsGpsApsAps(5m)Cps |
| | | (5m)CpsGpsApsmoeApslnGpsmoeTpsmoeGpsmoe(5m)C |
| ASO-954 | 975 | moeGpsmoe(5m)CpsmoeApsmoeGpslnApsGpsGpsTpsGpsApsApsTps(5m) |
| | | CpsGpsApsmoeApsmoeGpsmoeTpsmoeGpsmoe(5m)C |
| ASO-955 | 976 | moeGpsmoe(5m)CpsmoeApsmoeGpsmoeApsGpsGpsTpsGpsApsApsTps(5m) |
| | | CpsGpsApsmoeApslnGpsmoeTpsmoeGpsmoe(5m)C |
| ASO-956 | 977 | moeGpsmoe(5m)CpsmoeApsmoeGpslnApsGpsGpsTpsGpsApsmXpsGps(5m) |
| | | CpsGpsApsmoeApsmoeGpsmoeTpsmoeGpsmoe(5m)C |
| ASO-957 | 978 | moeGpsmoe(5m)CpsmoeApsmoeGpsmoeApsGpsGpsTpsGpsApsmXpsGps |
| | | (5m)CpsGpsApsmoeApslnGpsmoeTpsmoeGpsmoe(5m)C |
| ASO-958 | 979 | moeGpsmoe(5m)CpsmoeApsmoeGpslnApsGpsGpsTpsGpsdXpsApsGps(5m) |
| | | CpsGpsApsmoeApsmoeGpsmoeTpsmoeGpsmoe(5m)C |
| ASO-959 | 980 | moeGpsmoe(5m)CpsmoeApsmoeGpsmoeApsGpsGpsTpsGpsdXpsApsGps |
| | | (5m)CpsGpsApsmoeApslnGpsmoeTpsmoeGpsmoe(5m)C |
| ASO-960 | 981 | moeGpsmoe(5m)CpslnApsmoeGpslnApsGpsGpsTpsGpsApsmXpsGps(5m) |
| | | CpsGpsApsmoeApsmoeGpsmoeTpsmoeGpsmoe(5m)C |
| ASO-961 | 982 | moeGpsmoe(5m)CpsmoeApslnGpslnApsGpsGpsTpsGpsApsmXpsGps(5m) |
| | | CpsGpsApsmoeApsmoeGpsmoeTpsmoeGpsmoe(5m)C |
| ASO-962 | 983 | moeGpsmoe(5m)CpsmoeApslnGpsmoeApsGpsGpsTpsGpsApsmXpsGps(5m) |
| | | CpsGpsApslnApsmoeGpsmoeTpsmoeGpsmoe(5m)C |
| ASO-963 | 984 | moeGpsmoe(5m)CpsmoeApsmoeGpslnApsGpsGpsTpsGpsApsmXpsGps(5m) |
| | | CpsGpsApslnApsmoeGpsmoeTpsmoeGpsmoe(5m)C |
| ASO-964 | 985 | moeGpsmoe(5m)CpsmoeApsmoeGpslnApsGpsGpsTpsGpsApsmXpsGps(5m) |
| | | CpsGpsApsmoeApsmoeGpsmoeTpslnGpsmoe(5m)C |
| ASO-965 | 986 | moeGpsmoe(5m)CpsmoeApsmoeGpsmoeApsGpsGpsTpsGpsApsmXpsGps |
| | | (5m)CpsGpsApslnApsmoeGpslnTpsmoeGpsmoe(5m)C |
| ASO-966 | 987 | moeGpsmoe(5m)CpslnApsmoeGpslnApsGpsGpsTpsGpsGpsApsGps(5m)Cps |
| | | GpsApsmoeApsmoeGpsmoeTpsmoeGpsmoe(5m)C |
| ASO-967 | 988 | moeGpsmoe(5m)CpsmoeApslnGpslnApsGpsGpsTpsGpsGpsApsGps(5m)Cps |
| | | GpsApsmoeApsmoeGpsmoeTpsmoeGpsmoe(5m)C |
| ASO-968 | 989 | moeGpsmoe(5m)CpsmoeApslnGpsmoeApsGpsGpsTpsGpsGpsApsGps(5m) |
| | | CpsGpsApslnApsmoeGpsmoeTpsmoeGpsmoe(5m)C |
| ASO-969 | 990 | moeGpsmoe(5m)CpsmoeApsmoeGpslnApsGpsGpsTpsGpsGpsApsGps(5m) |
| | | CpsGpsApslnApsmoeGpsmoeTpsmoeGpsmoe(5m)C |
| ASO-970 | 991 | moeGpsmoe(5m)CpsmoeApsmoeGpslnApsGpsGpsTpsGpsGpsApsGps(5m) |
| | | CpsGpsApsmoeApsmoeGpsmoeTpslnGpsmoe(5m)C |
| ASO-971 | 992 | moeGpsmoe(5m)CpsmoeApsmoeGpsmoeApsGpsGpsTpsGpsGpsApsGps(5m) |
| | | CpsGpsApslnApsmoeGpslnTpsmoeGpsmoe(5m)C |
| ASO-972 | 993 | moeGpsmoe(5m)CpslnApsmoeGpslnApsGpsGpsTps(5m)CpsApsApsGps(5m) |
| | | CpsGpsApsmoeApsmoeGpsmoeTpsmoeGpsmoe(5m)C |
| ASO-973 | 994 | moeGpsmoe(5m)CpsmoeApslnGpslnApsGpsGpsTps(5m)CpsApsApsGps(5m) |
| | | CpsGpsApsmoeApsmoeGpsmoeTpsmoeGpsmoe(5m)C |
| ASO-974 | 995 | moeGpsmoe(5m)CpsmoeApslnGpsmoeApsGpsGpsTps(5m)CpsApsApsGps |
| | | (5m)CpsGpsApslnApsmoeGpsmoeTpsmoeGpsmoe(5m)C |
| ASO-975 | 996 | moeGpsmoe(5m)CpsmoeApsmoeGpslnApsGpsGpsTps(5m)CpsApsApsGps |
| | | (5m)CpsGpsApslnApsmoeGpsmoeTpsmoeGpsmoe(5m)C |
| ASO-976 | 997 | moeGpsmoe(5m)CpsmoeApsmoeGpslnApsGpsGpsTps(5m)CpsApsApsGps |
| | | (5m)CpsGpsApsmoeApsmoeGpsmoeTpslnGpsmoe(5m)C |
| ASO-977 | 998 | moeGpsmoe(5m)CpsmoeApsmoeGpsmoeApsGpsGpsTps(5m)CpsApsApsGps |
| | | (5m)CpsGpsApslnApsmoeGpslnTpsmoeGpsmoe(5m)C |
| ASO-978 | 999 | moeGpsmoe(5m)CpslnApsmoeGpslnApsGpsGpsTpsGpsApsTpsGps(5m)Cps |
| | | GpsApsmoeApsmoeGpsmoeTpsmoeGpsmoe(5m)C |
| ASO-979 | 1000 | moeGpsmoe(5m)CpsmoeApslnGpslnApsGpsGpsTpsGpsApsTpsGps(5m)Cps |
| | | GpsApsmoeApsmoeGpsmoeTpsmoeGpsmoe(5m)C |
| ASO-980 | 1001 | moeGpsmoe(5m)CpsmoeApslnGpsmoeApsGpsGpsTpsGpsApsTpsGps(5m) |
| | | CpsGpsApslnApsmoeGpsmoeTpsmoeGpsmoe(5m)C |
| ASO-981 | 1002 | moeGpsmoe(5m)CpsmoeApsmoeGpslnApsGpsGpsTpsGpsApsTpsGps(5m) |
| | | CpsGpsApslnApsmoeGpsmoeTpsmoeGpsmoe(5m)C |
| ASO-982 | 1003 | moeGpsmoe(5m)CpsmoeApsmoeGpslnApsGpsGpsTpsGpsApsTpsGps(5m) |
| | | CpsGpsApsmoeApsmoeGpsmoeTpslnGpsmoe(5m)C |
| ASO-983 | 1004 | moeGpsmoe(5m)CpsmoeApsmoeGpsmoeApsGpsGpsTpsGpsApsTpsGps(5m) |
| | | CpsGpsApslnApsmoeGpslnTpsmoeGpsmoe(5m)C |
| ASO-984 | 1005 | moeGpsmoe(5m)CpslnApsmoeGpslnApsGpsGpsTpsGpsdXpsApsGps(5m)Cps |
| | | GpsApsmoeApsmoeGpsmoeTpsmoeGpsmoe(5m)C |
| ASO-985 | 1006 | moeGpsmoe(5m)CpsmoeApslnGpslnApsGpsGpsTpsGpsdXpsApsGps(5m)Cps |
| | | GpsApsmoeApsmoeGpsmoeTpsmoeGpsmoe(5m)C |
| ASO-986 | 1007 | moeGpsmoe(5m)CpsmoeApslnGpsmoeApsGpsGpsTpsGpsdXpsApsGps(5m) |
| | | CpsGpsApslnApsmoeGpsmoeTpsmoeGpsmoe(5m)C |
| ASO-987 | 1008 | moeGpsmoe(5m)CpsmoeApsmoeGpslnApsGpsGpsTpsGpsdXpsApsGps(5m) |
| | | CpsGpsApslnApsmoeGpsmoeTpsmoeGpsmoe(5m)C |
| ASO-988 | 1009 | moeGpsmoe(5m)CpsmoeApsmoeGpslnApsGpsGpsTpsGpsdXpsApsGps(5m) |
| | | CpsGpsApsmoeApsmoeGpsmoeTpslnGpsmoe(5m)C |
| ASO-989 | 1010 | moeGpsmoe(5m)CpsmoeApsmoeGpsmoeApsGpsGpsTpsGpsdXpsApsGps |
| | | (5m)CpsGpsApslnApsmoeGpslnTpsmoeGpsmoe(5m)C |
| ASO-990 | 1011 | moe(5m)CpsmoeApsmoeGpsmoeApsmoeGpsmXpsTpsGpsApsApsGps(5m) |
| | | CpsGpsApsApslnGpsmoeTpslnGpsmoe(5m)CpslnA |
| ASO-991 | 1012 | moe(5m)CpsmoeApsmoeGpsmoeApsmoeGpsGpsmXpsGpsApsApsGps(5m) |
| | | CpsGpsApsApslnGpsmoeTpslnGpsmoe(5m)CpslnA |
| ASO-992 | 1013 | moe(5m)CpsmoeApsmoeGpsmoeApsmoeGpsGpsTpsmXpsApsApsGps(5m) |
| | | CpsGpsApsApslnGpsmoeTpslnGpsmoe(5m)CpslnA |
| ASO-993 | 1014 | moe(5m)CpsmoeApsmoeGpsmoeApsmoeGpsGpsTpsGpsmXpsApsGps(5m) |
| | | CpsGpsApsApslnGpsmoeTpslnGpsmoe(5m)CpslnA |
| ASO-994 | 1015 | moe(5m)CpsmoeApsmoeGpsmoeApsmoeGpsGpsTpsGpsApsmXpsGps(5m) |
| | | CpsGpsApsApslnGpsmoeTpslnGpsmoe(5m)CpslnA |
| ASO-995 | 1016 | moe(5m)CpsmoeApsmoeGpsmoeApsmoeGpsGpsTpsGpsApsApsmXps(5m) |
| | | CpsGpsApsApslnGpsmoeTpslnGpsmoe(5m)CpslnA |
| ASO-996 | 1017 | moe(5m)CpsmoeApsmoeGpsmoeApsmoeGpsGpsTpsGpsApsApsGpsmXps |
| | | GpsApsApslnGpsmoeTpslnGpsmoe(5m)CpslnA |
| ASO-997 | 1018 | moe(5m)CpsmoeApsmoeGpsmoeApsmoeGpsGpsTpsGpsApsApsGps(5m) |
| | | CpsmXpsApsApslnGpsmoeTpslnGpsmoe(5m)CpslnA |
| ASO-998 | 1019 | moe(5m)CpsmoeApsmoeGpsmoeApsmoeGpsGpsTpsGpsApsApsGps(5m)Cps |
| | | GpsmXpsApslnGpsmoeTpslnGpsmoe(5m)CpslnA |
| ASO-999 | 1020 | moe(5m)CpsmoeApsmoeGpsmoeApsmoeGpsGpsTpsGpsApsApsGps(5m)Cps |
| | | GpsApsmXpslnGpsmoeTpslnGpsmoe(5m)CpslnA |
| ASO-1000 | 1021 | lnGpsln(5m)CpsmoeApsmoeGpsmoeApsGpsGpsTpsGpsApsmXpsGps(5m) |
| | | CpsGpsApsmoeApsmoeGpsmoeTpsmoeGpsmoe(5m)C |
| ASO-1001 | 1022 | lnGpsmoe(5m)CpslnApsmoeGpsmoeApsGpsGpsTpsGpsApsmXpsGps(5m) |
| | | CpsGpsApsmoeApsmoeGpsmoeTpsmoeGpsmoe(5m)C |
| ASO-1002 | 1023 | lnGpsmoe(5m)CpsmoeApslnGpsmoeApsGpsGpsTpsGpsApsmXpsGps(5m) |
| | | CpsGpsApsmoeApsmoeGpsmoeTpsmoeGpsmoe(5m)C |
| ASO-1003 | 1024 | lnGpsmoe(5m)CpsmoeApsmoeGpslnApsGpsGpsTpsGpsApsmXpsGps(5m) |
| | | CpsGpsApsmoeApsmoeGpsmoeTpsmoeGpsmoe(5m)C |
| ASO-1004 | 1025 | lnGpsmoe(5m)CpsmoeApsmoeGpsmoeApsGpsGpsTpsGpsApsmXpsGps(5m) |
| | | CpsGpsApslnApsmoeGpsmoeTpsmoeGpsmoe(5m)C |
| ASO-1005 | 1026 | lnGpsmoe(5m)CpsmoeApsmoeGpsmoeApsGpsGpsTpsGpsApsmXpsGps(5m) |
| | | CpsGpsApsmoeApslnGpsmoeTpsmoeGpsmoe(5m)C |
| ASO-1006 | 1027 | lnGpsmoe(5m)CpsmoeApsmoeGpsmoeApsGpsGpsTpsGpsApsmXpsGps(5m) |
| | | CpsGpsApsmoeApsmoeGpslnTpsmoeGpsmoe(5m)C |
| ASO-1007 | 1028 | lnGpsmoe(5m)CpsmoeApsmoeGpsmoeApsGpsGpsTpsGpsApsmXpsGps(5m) |
| | | CpsGpsApsmoeApsmoeGpsmoeTpslnGpsmoe(5m)C |
| ASO-1008 | 1029 | lnGpsmoe(5m)CpsmoeApsmoeGpsmoeApsGpsGpsTpsGpsApsmXpsGps(5m) |
| | | CpsGpsApsmoeApsmoeGpsmoeTpsmoeGpsln(5m)C |
| ASO-1009 | 1030 | moeGpsln(5m)CpslnApsmoeGpsmoeApsGpsGpsTpsGpsApsmXpsGps(5m)Cps |
| | | GpsApsmoeApsmoeGpsmoeTpsmoeGpsmoe(5m)C |
| ASO-1010 | 1031 | moeGpsln(5m)CpsmoeApslnGpsmoeApsGpsGpsTpsGpsApsmXpsGps(5m)Cps |
| | | GpsApsmoeApsmoeGpsmoeTpsmoeGpsmoe(5m)C |
| ASO-1011 | 1032 | moeGpsln(5m)CpsmoeApsmoeGpslnApsGpsGpsTpsGpsApsmXpsGps(5m)Cps |
| | | GpsApsmoeApsmoeGpsmoeTpsmoeGpsmoe(5m)C |
| ASO-1012 | 1033 | moeGpsln(5m)CpsmoeApsmoeGpsmoeApsGpsGpsTpsGpsApsmXpsGps(5m) |
| | | CpsGpsApslnApsmoeGpsmoeTpsmoeGpsmoe(5m)C |
| ASO-1013 | 1034 | moeGpsln(5m)CpsmoeApsmoeGpsmoeApsGpsGpsTpsGpsApsmXpsGps(5m) |
| | | CpsGpsApsmoeApslnGpsmoeTpsmoeGpsmoe(5m)C |
| ASO-1014 | 1035 | moeGpsln(5m)CpsmoeApsmoeGpsmoeApsGpsGpsTpsGpsApsmXpsGps(5m) |
| | | CpsGpsApsmoeApsmoeGpslnTpsmoeGpsmoe(5m)C |
| ASO-1015 | 1036 | moeGpsln(5m)CpsmoeApsmoeGpsmoeApsGpsGpsTpsGpsApsmXpsGps(5m) |
| | | CpsGpsApsmoeApsmoeGpsmoeTpslnGpsmoe(5m)C |
| ASO-1016 | 1037 | moeGpsln(5m)CpsmoeApsmoeGpsmoeApsGpsGpsTpsGpsApsmXpsGps(5m) |
| | | CpsGpsApsmoeApsmoeGpsmoeTpsmoeGpsln(5m)C |
| ASO-1017 | 1038 | moeGpsmoe(5m)CpslnApslnGpsmoeApsGpsGpsTpsGpsApsmXpsGps(5m)Cps |
| | | GpsApsmoeApsmoeGpsmoeTpsmoeGpsmoe(5m)C |
| ASO-1018 | 1039 | moeGpsmoe(5m)CpslnApsmoeGpsmoeApsGpsGpsTpsGpsApsmXpsGps(5m) |
| | | CpsGpsApslnApsmoeGpsmoeTpsmoeGpsmoe(5m)C |
| ASO-1019 | 1040 | moeGpsmoe(5m)CpslnApsmoeGpsmoeApsGpsGpsTpsGpsApsmXpsGps(5m) |
| | | CpsGpsApsmoeApslnGpsmoeTpsmoeGpsmoe(5m)C |
| ASO-1020 | 1041 | moeGpsmoe(5m)CpslnApsmoeGpsmoeApsGpsGpsTpsGpsApsmXpsGps(5m) |
| | | CpsGpsApsmoeApsmoeGpslnTpsmoeGpsmoe(5m)C |
| ASO-1021 | 1042 | moeGpsmoe(5m)CpslnApsmoeGpsmoeApsGpsGpsTpsGpsApsmXpsGps(5m) |
| | | CpsGpsApsmoeApsmoeGpsmoeTpslnGpsmoe(5m)C |
| ASO-1022 | 1043 | moeGpsmoe(5m)CpslnApsmoeGpsmoeApsGpsGpsTpsGpsApsmXpsGps(5m) |
| | | CpsGpsApsmoeApsmoeGpsmoeTpsmoeGpsln(5m)C |
| ASO-1023 | 1044 | moeGpsmoe(5m)CpsmoeApslnGpsmoeApsGpsGpsTpsGpsApsmXpsGps(5m) |
| | | CpsGpsApsmoeApslnGpsmoeTpsmoeGpsmoe(5m)C |
| ASO-1024 | 1045 | moeGpsmoe(5m)CpsmoeApslnGpsmoeApsGpsGpsTpsGpsApsmXpsGps(5m) |
| | | CpsGpsApsmoeApsmoeGpslnTpsmoeGpsmoe(5m)C |
| ASO-1025 | 1046 | moeGpsmoe(5m)CpsmoeApslnGpsmoeApsGpsGpsTpsGpsApsmXpsGps(5m) |
| | | CpsGpsApsmoeApsmoeGpsmoeTpslnGpsmoe(5m)C |
| ASO-1026 | 1047 | moeGpsmoe(5m)CpsmoeApslnGpsmoeApsGpsGpsTpsGpsApsmXpsGps(5m) |
| | | CpsGpsApsmoeApsmoeGpsmoeTpsmoeGpsln(5m)C |
| ASO-1027 | 1048 | moeGpsmoe(5m)CpsmoeApsmoeGpslnApsGpsGpsTpsGpsApsmXpsGps(5m) |
| | | CpsGpsApsmoeApslnGpsmoeTpsmoeGpsmoe(5m)C |
| ASO-1028 | 1049 | moeGpsmoe(5m)CpsmoeApsmoeGpslnApsGpsGpsTpsGpsApsmXpsGps(5m) |
| | | CpsGpsApsmoeApsmoeGpslnTpsmoeGpsmoe(5m)C |
| ASO-1029 | 1050 | moeGpsmoe(5m)CpsmoeApsmoeGpslnApsGpsGpsTpsGpsApsmXpsGps(5m) |
| | | CpsGpsApsmoeApsmoeGpsmoeTpsmoeGpsln(5m)C |
| ASO-1030 | 1051 | moeGpsmoe(5m)CpsmoeApsmoeGpsmoeApsGpsGpsTpsGpsApsmXpsGps |
| | | (5m)CpsGpsApslnApslnGpsmoeTpsmoeGpsmoe(5m)C |
| ASO-1031 | 1052 | moeGpsmoe(5m)CpsmoeApsmoeGpsmoeApsGpsGpsTpsGpsApsmXpsGps |
| | | (5m)CpsGpsApslnApsmoeGpsmoeTpslnGpsmoe(5m)C |
| ASO-1032 | 1053 | moeGpsmoe(5m)CpsmoeApsmoeGpsmoeApsGpsGpsTpsGpsApsmXpsGps |
| | | (5m)CpsGpsApslnApsmoeGpsmoeTpsmoeGpsln(5m)C |
| ASO-1033 | 1054 | moeGpsmoe(5m)CpsmoeApsmoeGpsmoeApsGpsGpsTpsGpsApsmXpsGps |
| | | (5m)CpsGpsApsmoeApslnGpslnTpsmoeGpsmoe(5m)C |
| ASO-1034 | 1055 | moeGpsmoe(5m)CpsmoeApsmoeGpsmoeApsGpsGpsTpsGpsApsmXpsGps |
| | | (5m)CpsGpsApsmoeApslnGpsmoeTpslnGpsmoe(5m)C |
| ASO-1035 | 1056 | moeGpsmoe(5m)CpsmoeApsmoeGpsmoeApsGpsGpsTpsGpsApsmXpsGps |
| | | (5m)CpsGpsApsmoeApslnGpsmoeTpsmoeGpsln(5m)C |
| ASO-1036 | 1057 | moeGpsmoe(5m)CpsmoeApsmoeGpsmoeApsGpsGpsTpsGpsApsmXpsGps |
| | | (5m)CpsGpsApsmoeApsmoeGpslnTpslnGpsmoe(5m)C |
| ASO-1037 | 1058 | moeGpsmoe(5m)CpsmoeApsmoeGpsmoeApsGpsGpsTpsGpsApsmXpsGps |
| | | (5m)CpsGpsApsmoeApsmoeGpslnTpsmoeGpsln(5m)C |
| ASO-1038 | 1059 | moeGpsmoe(5m)CpsmoeApsmoeGpsmoeApsGpsGpsTpsGpsApsmXpsGps |
| | | (5m)CpsGpsApsmoeApsmoeGpsmoeTpslnGpsln(5m)C |
| ASO-1039 | 1060 | lnGpsmoe(5m)CpsmoeApsmoeGpsmoeApsGpsGpsTpsGpsApsmXpsGps(5m) |
| | | CpsGpsApsmoeApsmoeGpsmoeTpsmoeGpsmoe(5m)C |
| ASO-1040 | 1061 | moeGpsln(5m)CpsmoeApsmoeGpsmoeApsGpsGpsTpsGpsApsmXpsGps(5m) |
| | | CpsGpsApsmoeApsmoeGpsmoeTpsmoeGpsmoe(5m)C |
| ASO-1041 | 1062 | moeGpsmoe(5m)CpslnApsmoeGpsmoeApsGpsGpsTpsGpsApsmXpsGps(5m) |
| | | CpsGpsApsmoeApsmoeGpsmoeTpsmoeGpsmoe(5m)C |
| ASO-1042 | 1063 | moeGpsmoe(5m)CpsmoeApslnGpsmoeApsGpsGpsTpsGpsApsmXpsGps(5m) |
| | | CpsGpsApsmoeApsmoeGpsmoeTpsmoeGpsmoe(5m)C |
| ASO-1043 | 1064 | moeGpsmoe(5m)CpsmoeApsmoeGpsmoeApsGpsGpsTpsGpsApsmXpsGps |
| | | (5m)CpsGpsApslnApsmoeGpsmoeTpsmoeGpsmoe(5m)C |
| ASO-1044 | 1065 | moeGpsmoe(5m)CpsmoeApsmoeGpsmoeApsGpsGpsTpsGpsApsmXpsGps |
| | | (5m)CpsGpsApsmoeApsmoeGpslnTpsmoeGpsmoe(5m)C |
| ASO-1045 | 1066 | moeGpsmoe(5m)CpsmoeApsmoeGpsmoeApsGpsGpsTpsGpsApsmXpsGps |
| | | (5m)CpsGpsApsmoeApsmoeGpsmoeTpslnGpsmoe(5m)C |
| ASO-1046 | 1067 | moeGpsmoe(5m)CpsmoeApsmoeGpsmoeApsGpsGpsTpsGpsApsmXpsGps |
| | | (5m)CpsGpsApsmoeApsmoeGpsmoeTpsmoeGpsln(5m)C |
| ASO-1047 | 1068 | lnGpsmoe(5m)CpsmoeApsmoeGpsmoeApsGpsGpsTpsGpsTpsApsGps(5m) |
| | | CpsGpsApsmoeApsmoeGpsmoeTpsmoeGpsmoe(5m)C |
| ASO-1048 | 1069 | moeGpsln(5m)CpsmoeApsmoeGpsmoeApsGpsGpsTpsGpsTpsApsGps(5m) |
| | | CpsGpsApsmoeApsmoeGpsmoeTpsmoeGpsmoe(5m)C |
| ASO-1049 | 1070 | moeGpsmoe(5m)CpslnApsmoeGpsmoeApsGpsGpsTpsGpsTpsApsGps(5m) |
| | | CpsGpsApsmoeApsmoeGpsmoeTpsmoeGpsmoe(5m)C |
| ASO-1050 | 1071 | moeGpsmoe(5m)CpsmoeApslnGpsmoeApsGpsGpsTpsGpsTpsApsGps(5m) |
| | | CpsGpsApsmoeApsmoeGpsmoeTpsmoeGpsmoe(5m)C |
| ASO-1051 | 1072 | moeGpsmoe(5m)CpsmoeApsmoeGpslnApsGpsGpsTpsGpsTpsApsGps(5m) |
| | | CpsGpsApsmoeApsmoeGpsmoeTpsmoeGpsmoe(5m)C |
| ASO-1052 | 1073 | moeGpsmoe(5m)CpsmoeApsmoeGpsmoeApsGpsGpsTpsGpsTpsApsGps(5m) |
| | | CpsGpsApslnApsmoeGpsmoeTpsmoeGpsmoe(5m)C |
| ASO-1053 | 1074 | moeGpsmoe(5m)CpsmoeApsmoeGpsmoeApsGpsGpsTpsGpsTpsApsGps(5m) |
| | | CpsGpsApsmoeApslnGpsmoeTpsmoeGpsmoe(5m)C |
| ASO-1054 | 1075 | moeGpsmoe(5m)CpsmoeApsmoeGpsmoeApsGpsGpsTpsGpsTpsApsGps(5m) |
| | | CpsGpsApsmoeApsmoeGpslnTpsmoeGpsmoe(5m)C |
| ASO-1055 | 1076 | moeGpsmoe(5m)CpsmoeApsmoeGpsmoeApsGpsGpsTpsGpsTpsApsGps(5m) |
| | | CpsGpsApsmoeApsmoeGpsmoeTpslnGpsmoe(5m)C |
| ASO-1056 | 1077 | moeGpsmoe(5m)CpsmoeApsmoeGpsmoeApsGpsGpsTpsGpsTpsApsGps(5m) |
| | | CpsGpsApsmoeApsmoeGpsmoeTpsmoeGpsln(5m)C |
| ASO-1057 | 1078 | monGalNAc4-p-moeGpsmoe(5m)CpsmoeApsmoeGpsmoeApsGpsGpsTpsGps |
| | | ApsApsGps(5m)CpsGpsApsmoeApsmoeGpsmoeTpsmoeGpsmoe(5m)C |
| ASO-1058 | 1079 | monGalNAc4-p-moeGpsmoe(5m)CpsmoeApsmoeGpsApsGpsGpsTpsGpsmoe |
| | | ApsApsGps(5m)CpsGpsApsmoeApslnGpsmoeTpslnGpsln(5m)C |
| ASO-1059 | 1080 | monGalNAc4-p-moe(5m)CpslnApsmoeGpsmoeApsmoeGpsGpsTpsGpsAps |
| | | ApsGps(5m)CpsGpsApsApsmoeGpsmoeTpslnGpsmoe(5m)CpsmoeA |
| ASO-1060 | 1081 | moeGpsmoe(5m)CpsmoeApsmoeGpsmoeApsGpsGpsTpslm(5m)CpsApsAps |
| | | Gps(5m)CpsGpsApsmoeApsmoeGpsmoeTpsmoeGpsmoe(5m)C |
| ASO-1061 | 1082 | moeGpsmoe(5m)CpsmoeApsmoeGpsmoeApsGpsGpsTpslmTpsApsApsGps |
| | | (5m)CpsGpsApsmoeApsmoeGpsmoeTpsmoeGpsmoe(5m)C |
| ASO-1062 | 1083 | moeGpsmoe(5m)CpsmoeApsmoeGpsmoeApsGpsGpsTpsGpslmGpsApsGps |
| | | (5m)CpsGpsApsmoeApsmoeGpsmoeTpsmoeGpsmoe(5m)C |
| ASO-1063 | 1084 | moeGpsmoe(5m)CpsmoeApsmoeGpsmoeApsGpsGpsTpsGpsApslmTpsGps |
| | | (5m)CpsGpsApsmoeApsmoeGpsmoeTpsmoeGpsmoe(5m)C |
| ASO-1064 | 1085 | moeGpsmoe(5m)CpsmoeApsmoeGpsmoeApsGpsGpsTpsGpsApsApslmAps |
| | | (5m)CpsGpsApsmoeApsmoeGpsmoeTpsmoeGpsmoe(5m)C |
| ASO-1065 | 1086 | moeGpsmoe(5m)CpsmoeApsmoeGpsmoeApsGpsGpsTpsGpsApsApslm(5m) |
| | | Cps(5m)CpsGpsApsmoeApsmoeGpsmoeTpsmoeGpsmoe(5m)C |
| ASO-1066 | 1087 | moeGpsmoe(5m)CpsmoeApsmoeGpsmoeApsGpsGpsTpsGpsApsApslmTps |
| | | (5m)CpsGpsApsmoeApsmoeGpsmoeTpsmoeGpsmoe(5m)C |
| ASO-1067 | 1088 | monGalNAc4-p-moeGpsmoe(5m)CpsmoeApslnGpsmoeApsGpsGpsTpsGps |
| | | ApsmXpsGps(5m)CpsGpsApslnApsmoeGpsmoeTpsmoeGpsmoe(5m)C |
| ASO-1068 | 1089 | lnGpsln(5m)CpsmoeApsmoeGpsmoeApsGpsGpsTpsGpsTpsApsGps(5m)Cps |
| | | GpsApsmoeApsmoeGpsmoeTpsmoeGpsmoe(5m)C |
| ASO-1069 | 1090 | lnGpsmoe(5m)CpslnApsmoeGpsmoeApsGpsGpsTpsGpsTpsApsGps(5m)Cps |
| | | GpsApsmoeApsmoeGpsmoeTpsmoeGpsmoe(5m)C |
| ASO-1070 | 1091 | lnGpsmoe(5m)CpsmoeApslnGpsmoeApsGpsGpsTpsGpsTpsApsGps(5m)Cps |
| | | GpsApsmoeApsmoeGpsmoeTpsmoeGpsmoe(5m)C |
| ASO-1071 | 1092 | lnGpsmoe(5m)CpsmoeApsmoeGpslnApsGpsGpsTpsGpsTpsApsGps(5m)Cps |
| | | GpsApsmoeApsmoeGpsmoeTpsmoeGpsmoe(5m)C |
| ASO-1072 | 1093 | lnGpsmoe(5m)CpsmoeApsmoeGpsmoeApsGpsGpsTpsGpsTpsApsGps(5m)Cps |
| | | GpsApslnApsmoeGpsmoeTpsmoeGpsmoe(5m)C |
| ASO-1073 | 1094 | lnGpsmoe(5m)CpsmoeApsmoeGpsmoeApsGpsGpsTpsGpsTpsApsGps(5m)Cps |
| | | GpsApsmoeApslnGpsmoeTpsmoeGpsmoe(5m)C |
| ASO-1074 | 1095 | lnGpsmoe(5m)CpsmoeApsmoeGpsmoeApsGpsGpsTpsGpsTpsApsGps(5m)Cps |
| | | GpsApsmoeApsmoeGpslnTpsmoeGpsmoe(5m)C |
| ASO-1075 | 1096 | lnGpsmoe(5m)CpsmoeApsmoeGpsmoeApsGpsGpsTpsGpsTpsApsGps(5m)Cps |
| | | GpsApsmoeApsmoeGpsmoeTpslnGpsmoe(5m)C |
| ASO-1076 | 1097 | lnGpsmoe(5m)CpsmoeApsmoeGpsmoeApsGpsGpsTpsGpsTpsApsGps(5m)Cps |
| | | GpsApsmoeApsmoeGpsmoeTpsmoeGpsln(5m)C |
| ASO-1077 | 1098 | moeGpsln(5m)CpslnApsmoeGpsmoeApsGpsGpsTpsGpsTpsApsGps(5m)Cps |
| | | GpsApsmoeApsmoeGpsmoeTpsmoeGpsmoe(5m)C |
| ASO-1078 | 1099 | moeGpsln(5m)CpsmoeApslnGpsmoeApsGpsGpsTpsGpsTpsApsGps(5m)Cps |
| | | GpsApsmoeApsmoeGpsmoeTpsmoeGpsmoe(5m)C |
| ASO-1079 | 1100 | moeGpsln(5m)CpsmoeApsmoeGpslnApsGpsGpsTpsGpsTpsApsGps(5m)Cps |
| | | GpsApsmoeApsmoeGpsmoeTpsmoeGpsmoe(5m)C |
| ASO-1080 | 1101 | moeGpsln(5m)CpsmoeApsmoeGpsmoeApsGpsGpsTpsGpsTpsApsGps(5m)Cps |
| | | GpsApslnApsmoeGpsmoeTpsmoeGpsmoe(5m)C |
| ASO-1081 | 1102 | moeGpsln(5m)CpsmoeApsmoeGpsmoeApsGpsGpsTpsGpsTpsApsGps(5m)Cps |
| | | GpsApsmoeApslnGpsmoeTpsmoeGpsmoe(5m)C |
| ASO-1082 | 1103 | moeGpsln(5m)CpsmoeApsmoeGpsmoeApsGpsGpsTpsGpsTpsApsGps(5m)Cps |
| | | GpsApsmoeApsmoeGpslnTpsmoeGpsmoe(5m)C |
| ASO-1083 | 1104 | moeGpsln(5m)CpsmoeApsmoeGpsmoeApsGpsGpsTpsGpsTpsApsGps(5m)Cps |
| | | GpsApsmoeApsmoeGpsmoeTpslnGpsmoe(5m)C |
| ASO-1084 | 1105 | moeGpsln(5m)CpsmoeApsmoeGpsmoeApsGpsGpsTpsGpsTpsApsGps(5m)Cps |
| | | GpsApsmoeApsmoeGpsmoeTpsmoeGpsln(5m)C |
| ASO-1085 | 1106 | moeGpsmoe(5m)CpslnApslnGpsmoeApsGpsGpsTpsGpsTpsApsGps(5m)Cps |
| | | GpsApsmoeApsmoeGpsmoeTpsmoeGpsmoe(5m)C |
| ASO-1086 | 1107 | moeGpsmoe(5m)CpslnApsmoeGpslnApsGpsGpsTpsGpsTpsApsGps(5m)Cps |
| | | GpsApsmoeApsmoeGpsmoeTpsmoeGpsmoe(5m)C |
| ASO-1087 | 1108 | moeGpsmoe(5m)CpslnApsmoeGpsmoeApsGpsGpsTpsGpsTpsApsGps(5m)Cps |
| | | GpsApslnApsmoeGpsmoeTpsmoeGpsmoe(5m)C |
| ASO-1088 | 1109 | moeGpsmoe(5m)CpslnApsmoeGpsmoeApsGpsGpsTpsGpsTpsApsGps(5m)Cps |
| | | GpsApsmoeApslnGpsmoeTpsmoeGpsmoe(5m)C |
| ASO-1089 | 1110 | moeGpsmoe(5m)CpslnApsmoeGpsmoeApsGpsGpsTpsGpsTpsApsGps(5m)Cps |
| | | GpsApsmoeApsmoeGpslnTpsmoeGpsmoe(5m)C |
| ASO-1090 | 1111 | moeGpsmoe(5m)CpslnApsmoeGpsmoeApsGpsGpsTpsGpsTpsApsGps(5m)Cps |
| | | GpsApsmoeApsmoeGpsmoeTpslnGpsmoe(5m)C |
| ASO-1091 | 1112 | moeGpsmoe(5m)CpslnApsmoeGpsmoeApsGpsGpsTpsGpsTpsApsGps(5m)Cps |
| | | GpsApsmoeApsmoeGpsmoeTpsmoeGpsln(5m)C |
| ASO-1092 | 1113 | moeGpsmoe(5m)CpsmoeApsmoeGpslnApsGpsGpsTpsGpsTpsApsGps(5m)Cps |
| | | GpsApsmoeApsmoeGpsmoeTpslnGpsmoe(5m)C |
| ASO-1093 | 1114 | moeGpsmoe(5m)CpsmoeApsmoeGpslnApsGpsGpsTpsGpsTpsApsGps(5m)Cps |
| | | GpsApsmoeApsmoeGpslnTpsmoeGpsmoe(5m)C |
| ASO-1094 | 1115 | moeGpsmoe(5m)CpsmoeApsmoeGpslnApsGpsGpsTpsGpsTpsApsGps(5m)Cps |
| | | GpsApsmoeApslnGpsmoeTpsmoeGpsmoe(5m)C |
| ASO-1095 | 1116 | moeGpsmoe(5m)CpsmoeApsmoeGpslnApsGpsGpsTpsGpsTpsApsGps(5m)Cps |
| | | GpsApslnApsmoeGpsmoeTpsmoeGpsmoe(5m)C |
| ASO-1096 | 1117 | moeGpsmoe(5m)CpsmoeApslnGpsmoeApsGpsGpsTpsGpsTpsApsGps(5m)Cps |
| | | GpsApsmoeApsmoeGpsmoeTpsmoeGpsln(5m)C |
| ASO-1097 | 1118 | moeGpsmoe(5m)CpsmoeApslnGpsmoeApsGpsGpsTpsGpsTpsApsGps(5m)Cps |
| | | GpsApsmoeApsmoeGpsmoeTpslnGpsmoe(5m)C |
| ASO-1098 | 1119 | moeGpsmoe(5m)CpsmoeApslnGpsmoeApsGpsGpsTpsGpsTpsApsGps(5m)Cps |
| | | GpsApsmoeApsmoeGpslnTpsmoeGpsmoe(5m)C |
| ASO-1099 | 1120 | moeGpsmoe(5m)CpsmoeApslnGpsmoeApsGpsGpsTpsGpsTpsApsGps(5m)Cps |
| | | GpsApsmoeApslnGpsmoeTpsmoeGpsmoe(5m)C |
| ASO-1100 | 1121 | moeGpsmoe(5m)CpsmoeApslnGpsmoeApsGpsGpsTpsGpsTpsApsGps(5m)Cps |
| | | GpsApslnApsmoeGpsmoeTpsmoeGpsmoe(5m)C |
| ASO-1101 | 1122 | moeGpsmoe(5m)CpsmoeApslnGpslnApsGpsGpsTpsGpsTpsApsGps(5m)Cps |
| | | GpsApsmoeApsmoeGpsmoeTpsmoeGpsmoe(5m)C |
| ASO-1102 | 1123 | moeGpsmoe(5m)CpsmoeApsmoeGpsmoeApsGpsGpsTpsGpsTpsApsGps(5m) |
| | | CpsGpsApsmoeApsmoeGpsmoeTpslnGpsln(5m)C |
| ASO-1103 | 1124 | moeGpsmoe(5m)CpsmoeApsmoeGpsmoeApsGpsGpsTpsGpsTpsApsGps(5m) |
| | | CpsGpsApsmoeApsmoeGpslnTpsmoeGpsln(5m)C |
| ASO-1104 | 1125 | moeGpsmoe(5m)CpsmoeApsmoeGpsmoeApsGpsGpsTpsGpsTpsApsGps(5m) |
| | | CpsGpsApsmoeApsmoeGpslnTpslnGpsmoe(5m)C |
| ASO-1105 | 1126 | moeGpsmoe(5m)CpsmoeApsmoeGpsmoeApsGpsGpsTpsGpsTpsApsGps(5m) |
| | | CpsGpsApsmoeApslnGpsmoeTpsmoeGpsln(5m)C |
| ASO-1106 | 1127 | moeGpsmoe(5m)CpsmoeApsmoeGpsmoeApsGpsGpsTpsGpsTpsApsGps(5m) |
| | | CpsGpsApsmoeApslnGpsmoeTpslnGpsmoe(5m)C |
| ASO-1107 | 1128 | moeGpsmoe(5m)CpsmoeApsmoeGpsmoeApsGpsGpsTpsGpsTpsApsGps(5m) |
| | | CpsGpsApsmoeApslnGpslnTpsmoeGpsmoe(5m)C |
| ASO-1108 | 1129 | moeGpsmoe(5m)CpsmoeApsmoeGpsmoeApsGpsGpsTpsGpsTpsApsGps(5m) |
| | | CpsGpsApslnApsmoeGpsmoeTpsmoeGpsln(5m)C |
| ASO-1109 | 1130 | moeGpsmoe(5m)CpsmoeApsmoeGpsmoeApsGpsGpsTpsGpsTpsApsGps(5m) |
| | | CpsGpsApslnApsmoeGpsmoeTpslnGpsmoe(5m)C |
| ASO-1110 | 1131 | moeGpsmoe(5m)CpsmoeApsmoeGpsmoeApsGpsGpsTpsGpsTpsApsGps(5m) |
| | | CpsGpsApslnApsmoeGpslnTpsmoeGpsmoe(5m)C |
| ASO-1111 | 1132 | moeGpsmoe(5m)CpsmoeApsmoeGpsmoeApsGpsGpsTpsGpsTpsApsGps(5m) |
| | | CpsGpsApslnApslnGpsmoeTpsmoeGpsmoe(5m)C |
| ASO-1112 | 1133 | moeGpsmoe(5m)CpsmoeApsmoeGpslnApsGpsGpsTpsGpsTpsApsGps(5m) |
| | | CpsGpsApsmoeApsmoeGpsmoeTpsmoeGpsln(5m)C |
| ASO-1113 | 1134 | gutbGpsmoe(5m)CpsmoeApsmoeGpsmoeApsGpsGpsTpsGpsApsmXpsGps |
| | | (5m)CpsGpsApsmoeApsmoeGpsmoeTpsmoeGpsmoe(5m)C |
| ASO-1114 | 1135 | moeGpsgutb(5m)CpsmoeApsmoeGpsmoeApsGpsGpsTpsGpsApsmXpsGps |
| | | (5m)CpsGpsApsmoeApsmoeGpsmoeTpsmoeGpsmoe(5m)C |
| ASO-1115 | 1136 | moeGpsmoe(5m)CpsgutbApsmoeGpsmoeApsGpsGpsTpsGpsApsmXpsGps |
| | | (5m)CpsGpsApsmoeApsmoeGpsmoeTpsmoeGpsmoe(5m)C |
| ASO-1116 | 1137 | moeGpsmoe(5m)CpsmoeApsgutbGpsmoeApsGpsGpsTpsGpsApsmXpsGps |
| | | (5m)CpsGpsApsmoeApsmoeGpsmoeTpsmoeGpsmoe(5m)C |
| ASO-1117 | 1138 | moeGpsmoe(5m)CpsmoeApsmoeGpsgutbApsGpsGpsTpsGpsApsmXpsGps |
| | | (5m)CpsGpsApsmoeApsmoeGpsmoeTpsmoeGpsmoe(5m)C |
| ASO-1118 | 1139 | moeGpsmoe(5m)CpsmoeApsmoeGpsmoeApsGpsGpsTpsGpsApsmXpsGps |
| | | (5m)CpsGpsApsgutbApsmoeGpsmoeTpsmoeGpsmoe(5m)C |
| ASO-1119 | 1140 | moeGpsmoe(5m)CpsmoeApsmoeGpsmoeApsGpsGpsTpsGpsApsmXpsGps |
| | | (5m)CpsGpsApsmoeApsgutbGpsmoeTpsmoeGpsmoe(5m)C |
| ASO-1120 | 1141 | moeGpsmoe(5m)CpsmoeApsmoeGpsmoeApsGpsGpsTpsGpsApsmXpsGps |
| | | (5m)CpsGpsApsmoeApsmoeGpsgutbTpsmoeGpsmoe(5m)C |
| ASO-1121 | 1142 | moeGpsmoe(5m)CpsmoeApsmoeGpsmoeApsGpsGpsTpsGpsApsmXpsGps |
| | | (5m)CpsGpsApsmoeApsmoeGpsmoeTpsgutbGpsmoe(5m)C |
| ASO-1122 | 1143 | moeGpsmoe(5m)CpsmoeApsmoeGpsmoeApsGpsGpsTpsGpsApsmXpsGps |
| | | (5m)CpsGpsApsmoeApsmoeGpsmoeTpsmoeGpsgutb(5m)C |
| ASO-1123 | 1144 | gutbGpsmoe(5m)CpsmoeApsmoeGpsmoeApsGpsGpsTpsGpsTpsApsGps(5m) |
| | | CpsGpsApsmoeApsmoeGpsmoeTpsmoeGpsmoe(5m)C |
| ASO-1124 | 1145 | moeGpsgutb(5m)CpsmoeApsmoeGpsmoeApsGpsGpsTpsGpsTpsApsGps(5m) |
| | | CpsGpsApsmoeApsmoeGpsmoeTpsmoeGpsmoe(5m)C |
| ASO-1125 | 1146 | moeGpsmoe(5m)CpsgutbApsmoeGpsmoeApsGpsGpsTpsGpsTpsApsGps(5m) |
| | | CpsGpsApsmoeApsmoeGpsmoeTpsmoeGpsmoe(5m)C |
| ASO-1126 | 1147 | moeGpsmoe(5m)CpsmoeApsgutbGpsmoeApsGpsGpsTpsGpsTpsApsGps(5m) |
| | | CpsGpsApsmoeApsmoeGpsmoeTpsmoeGpsmoe(5m)C |
| ASO-1127 | 1148 | moeGpsmoe(5m)CpsmoeApsmoeGpsgutbApsGpsGpsTpsGpsTpsApsGps(5m) |
| | | CpsGpsApsmoeApsmoeGpsmoeTpsmoeGpsmoe(5m)C |
| ASO-1128 | 1149 | moeGpsmoe(5m)CpsmoeApsmoeGpsmoeApsGpsGpsTpsGpsTpsApsGps(5m) |
| | | CpsGpsApsgutbApsmoeGpsmoeTpsmoeGpsmoe(5m)C |
| ASO-1129 | 1150 | moeGpsmoe(5m)CpsmoeApsmoeGpsmoeApsGpsGpsTpsGpsTpsApsGps(5m) |
| | | CpsGpsApsmoeApsgutbGpsmoeTpsmoeGpsmoe(5m)C |
| ASO-1130 | 1151 | moeGpsmoe(5m)CpsmoeApsmoeGpsmoeApsGpsGpsTpsGpsTpsApsGps(5m) |
| | | CpsGpsApsmoeApsmoeGpsgutbTpsmoeGpsmoe(5m)C |
| ASO-1131 | 1152 | moeGpsmoe(5m)CpsmoeApsmoeGpsmoeApsGpsGpsTpsGpsTpsApsGps(5m) |
| | | CpsGpsApsmoeApsmoeGpsmoeTpsgutbGpsmoe(5m)C |
| ASO-1132 | 1153 | moeGpsmoe(5m)CpsmoeApsmoeGpsmoeApsGpsGpsTpsGpsTpsApsGps(5m) |
| | | CpsGpsApsmoeApsmoeGpsmoeTpsmoeGpsgutb(5m)C |
| ASO-1133 | 1154 | monGalNAc4-p-moeGpsmoe(5m)CpsmoeApsmoeGpslnApsGpsGpsTpsGps |
| | | ApsmXpsGps(5m)CpsGpsApslnApsmoeGpsmoeTpsmoeGpsmoe(5m)C |
| ASO-1134 | 1155 | monGalNAc4-p-moeGpsmoe(5m)CpsmoeApsmoeGpsmoeApsGpsGpsTpsGps |
| | | ApsmXpsGps(5m)CpsGpsApslnApsmoeGpslnTpsmoeGpsmoe(5m)C |
| ASO-1135 | 1156 | moe(5m)CpsmoeApsmGpsmoeApsmGpsGpsTpsGpsApsApsGps(5m)CpsGps |
| | | ApsApsmoeGpsmoeTpsgutbGpsmoe(5m)CpsmoeA |
| ASO-1136 | 1157 | moe(5m)CpsmoeApsmoeGpsmoeApsmoeGpsGpsTpsGpsApsApsGps(5m)Cps |
| | | GpsApsApsmoeGpsmoeTpsgutbGpsm(5m)CpsmA |
| ASO-1137 | 1158 | moe(5m)CpsmoeApsmoeGpsmoeApsmoeGpsGpsTpsGpsApsApsGps(5m)Cps |
| | | GpsApsApsmGpsmoeTpsgutbGpsmoe(5m)CpsmA |
| ASO-1138 | 1159 | moe(5m)CpsmoeApsmoeGpsmoeApsmoeGpsGpsTpsGpsApsApsGps(5m)Cps |
| | | GpsApsApslnGpsmoeTpsgutbGpsmoe(5m)CpsmoeA |
| ASO-1139 | 1160 | moe(5m)CpsmoeApsmoeGpsmoeApsmoeGpsGpsTpsGpsApsApsGps(5m)Cps |
| | | GpsApsApsmoeGpslnTpsgutbGpsmoe(5m)CpsmoeA |
| ASO-1140 | 1161 | moe(5m)CpsmoeApsmoeGpsmoeApsmoeGpsGpsTpsGpsApsApsGps(5m)Cps |
| | | GpsApsApsmoeGpsmoeTpsgutbGpsln(5m)CpsmoeA |
| ASO-1141 | 1162 | moe(5m)CpsmoeApsmoeGpsmoeApsmoeGpsGpsTpsGpsApsApsGps(5m)Cps |
| | | GpsApsApsmoeGpsmoeTpsgutbGpsmoe(5m)CpslnA |
| ASO-1142 | 1163 | moe(5m)CpsmoeApslnGpsmoeApslnGpsGpsTpsGpsApsApsGps(5m)CpsGps |
| | | ApsApsmoeGpsmoeTpsgutbGpsmoe(5m)CpsmoeA |
| ASO-1143 | 1164 | moe(5m)CpsmoeApslnGpsmoeApsmoeGpsGpsTpsGpsApsApsGps(5m)Cps |
| | | GpsApsApslnGpsmoeTpsgutbGpsmoe(5m)CpsmoeA |
| ASO-1144 | 1165 | moe(5m)CpsmoeApsmoeGpsmoeApslnGpsGpsTpsGpsApsApsGps(5m)Cps |
| | | GpsApsApslnGpsmoeTpsgutbGpsmoe(5m)CpsmoeA |
| ASO-1145 | 1166 | moe(5m)CpsmoeApsmoeGpsmoeApsmoeGpsGpsTpsGpsApsApsGps(5m)Cps |
| | | GpsApsApslnGpsmoeTpsgutbGpsmoe(5m)CpslnA |
| ASO-1146 | 1167 | moe(5m)CpslnApsmoeGpsmoeApsmoeGpsGpsTpsGpsApsApsGps(5m)Cps |
| | | GpsApsApsmoeGpslnTpsgutbGpsmoe(5m)CpsmoeA |
| ASO-1147 | 1168 | moe(5m)CpsmoeApsmGpsmoeApsmGpsGpsTpsGpsApsApsGps(5m)CpsGps |
| | | ApsApsmoeGpsmoeTpsmoeGpsgutb(5m)CpsmoeA |
| ASO-1148 | 1169 | moe(5m)CpsmoeApsmoeGpsmoeApsmoeGpsGpsTpsGpsApsApsGps(5m)Cps |
| | | GpsApsApsmoeGpsmoeTpsmGpsgutb(5m)CpsmA |
| ASO-1149 | 1170 | moe(5m)CpsmoeApsmoeGpsmoeApsmoeGpsGpsTpsGpsApsApsGps(5m)Cps |
| | | GpsApsApsmGpsmoeTpsmGpsgutb(5m)CpsmoeA |
| ASO-1150 | 1171 | moe(5m)CpsmoeApsmoeGpsmoeApsmoeGpsGpsTpsGpsApsApsGps(5m)Cps |
| | | GpsApsApslnGpsmoeTpsmoeGpsgutb(5m)CpsmoeA |
| ASO-1151 | 1172 | moe(5m)CpsmoeApsmoeGpsmoeApsmoeGpsGpsTpsGpsApsApsGps(5m)Cps |
| | | GpsApsApsmoeGpslnTpsmoeGpsgutb(5m)CpsmoeA |
| ASO-1152 | 1173 | moe(5m)CpsmoeApsmoeGpsmoeApsmoeGpsGpsTpsGpsApsApsGps(5m)Cps |
| | | GpsApsApsmoeGpsmoeTpslnGpsgutb(5m)CpsmoeA |
| ASO-1153 | 1174 | moe(5m)CpsmoeApsmoeGpsmoeApsmoeGpsGpsTpsGpsApsApsGps(5m)Cps |
| | | GpsApsApsmoeGpsmoeTpsmoeGpsgutb(5m)CpslnA |
| ASO-1154 | 1175 | moe(5m)CpsmoeApslnGpsmoeApslnGpsGpsTpsGpsApsApsGps(5m)CpsGps |
| | | ApsApsmoeGpsmoeTpsmoeGpsgutb(5m)CpsmoeA |
| ASO-1155 | 1176 | moe(5m)CpsmoeApslnGpsmoeApsmoeGpsGpsTpsGpsApsApsGps(5m)Cps |
| | | GpsApsApslnGpsmoeTpsmoeGpsgutb(5m)CpsmoeA |
| ASO-1156 | 1177 | moe(5m)CpsmoeApsmoeGpsmoeApslnGpsGpsTpsGpsApsApsGps(5m)Cps |
| | | GpsApsApslnGpsmoeTpsmoeGpsgutb(5m)CpsmoeA |
| ASO-1157 | 1178 | moe(5m)CpsmoeApsmoeGpsmoeApsmoeGpsGpsTpsGpsApsApsGps(5m)Cps |
| | | GpsApsApslnGpsmoeTpsmoeGpsgutb(5m)CpslnA |
| ASO-1158 | 1179 | moe(5m)CpslnApsmoeGpsmoeApsmoeGpsGpsTpsGpsApsApsGps(5m)Cps |
| | | GpsApsApsmoeGpslnTpsmoeGpsgutb(5m)CpsmoeA |
| ASO-1159 | 1180 | moe(5m)CpslnApsmoeGpsmoeApsmoeGpsGpsTpsGpsApsApsGps(5m)Cps |
| | | GpsApsApsmoeGpsmoeTpslnGpsgutb(5m)CpsmoeA |
| ASO-1160 | 1181 | moeGpsmoe(5m)CpslnApsmoeGpslnApsGpsGpsTpsGpsApsApsAps(5m)Cps |
| | | GpsApsmoeApsmoeGpsmoeTpsmoeGpsmoe(5m)C |
| ASO-1161 | 1182 | moeGpsmoe(5m)CpsmoeApslnGpslnApsGpsGpsTpsGpsApsApsAps(5m)Cps |
| | | GpsApsmoeApsmoeGpsmoeTpsmoeGpsmoe(5m)C |
| ASO-1162 | 1183 | moeGpsmoe(5m)CpsmoeApslnGpsmoeApsGpsGpsTpsGpsApsApsAps(5m) |
| | | CpsGpsApslnApsmoeGpsmoeTpsmoeGpsmoe(5m)C |
| ASO-1163 | 1184 | moeGpsmoe(5m)CpsmoeApsmoeGpslnApsGpsGpsTpsGpsApsApsAps(5m) |
| | | CpsGpsApslnApsmoeGpsmoeTpsmoeGpsmoe(5m)C |
| ASO-1164 | 1185 | moeGpsmoe(5m)CpsmoeApsmoeGpslnApsGpsGpsTpsGpsApsApsAps(5m) |
| | | CpsGpsApsmoeApsmoeGpsmoeTpslnGpsmoe(5m)C |
| ASO-1165 | 1186 | moeGpsmoe(5m)CpsmoeApsmoeGpsmoeApsGpsGpsTpsGpsApsApsAps(5m) |
| | | CpsGpsApslnApsmoeGpslnTpsmoeGpsmoe(5m)C |
| ASO-1166 | 1187 | monGalNAc4-p-moeGpsmoe(5m)CpsmoeApsmoeGpsmoeApsGpsGpsTpsGps |
| | | ApsmXpsGps(5m)CpsGpsApsmoeApsmoeGpsmoeTpsmoeGpsmoe(5m)C |
| ASO-1167 | 1188 | moeGpsmoe(5m)CpslnApsmoeGpslnApsGpsGpsTpsGpsApsdXpsGps(5m)Cps |
| | | GpsApsmoeApsmoeGpsmoeTpsmoeGpsmoe(5m)C |
| ASO-1168 | 1189 | moeGpsmoe(5m)CpsmoeApslnGpslnApsGpsGpsTpsGpsApsdXpsGps(5m)Cps |
| | | GpsApsmoeApsmoeGpsmoeTpsmoeGpsmoe(5m)C |
| ASO-1169 | 1190 | moeGpsmoe(5m)CpsmoeApslnGpsmoeApsGpsGpsTpsGpsApsdXpsGps(5m) |
| | | CpsGpsApslnApsmoeGpsmoeTpsmoeGpsmoe(5m)C |
| ASO-1170 | 1191 | moeGpsmoe(5m)CpsmoeApsmoeGpslnApsGpsGpsTpsGpsApsdXpsGps(5m) |
| | | CpsGpsApslnApsmoeGpsmoeTpsmoeGpsmoe(5m)C |
| ASO-1171 | 1192 | moeGpsmoe(5m)CpsmoeApsmoeGpslnApsGpsGpsTpsGpsApsdXpsGps(5m) |
| | | CpsGpsApsmoeApsmoeGpsmoeTpslnGpsmoe(5m)C |
| ASO-1172 | 1193 | moeGpsmoe(5m)CpsmoeApsmoeGpsmoeApsGpsGpsTpsGpsApsdXpsGps |
| | | (5m)CpsGpsApslnApsmoeGpslnTpsmoeGpsmoe(5m)C |
| ASO-1173 | 1194 | moeGpsmoe(5m)CpsmoeApsmoeGpsmoeApsGpsGpsTpslmCpsApsApsGps |
| | | (5m)CpsGpsApsmoeApsmoeGpsmoeTpsmoeGpsmoe(5m)C |
| ASO-1174 | 1195 | moeGpsmoe(5m)CpsmoeApsmoeGpsmoeApsGpsGpsTpslmUpsApsApsGps |
| | | (5m)CpsGpsApsmoeApsmoeGpsmoeTpsmoeGpsmoe(5m)C |
| ASO-1175 | 1196 | moeGpsmoe(5m)CpsmoeApsmoeGpsmoeApsGpsGpsTpsGpslmGpsApsGps |
| | | (5m)CpsGpsApsmoeApsmoeGpsmoeTpsmoeGpsmoe(5m)C |
| ASO-1176 | 1197 | moeGpsmoe(5m)CpsmoeApsmoeGpsmoeApsGpsGpsTpsGpsApslmUpsGps |
| | | (5m)CpsGpsApsmoeApsmoeGpsmoeTpsmoeGpsmoe(5m)C |
| ASO-1177 | 1198 | moeGpsmoe(5m)CpsmoeApsmoeGpsmoeApsGpsGpsTpsGpsApsApslmCps |
| | | (5m)CpsGpsApsmoeApsmoeGpsmoeTpsmoeGpsmoe(5m)C |
| ASO-1178 | 1199 | moeGpsmoe(5m)CpsmoeApsmoeGpsmoeApsGpsGpsTpsGpsApsApslmUps |
| | | (5m)CpsGpsApsmoeApsmoeGpsmoeTpsmoeGpsmoe(5m)C |
| ASO-1179 | 1200 | monGalNAc4-p-moeGpsmoe(5m)CpsmoeApsmoeGpsmoeApsGpsGpsTpsGps |
| | | ApsmXpsGps(5m)CpsGpsApsmoeApsmoeGpslnTpsmoeGpsln(5m)C |
| ASO-1180 | 1201 | monGalNAc4-p-moeGpsmoe(5m)CpsmoeApsmoeGpsmoeApsGpsGpsTpsGps |
| | | ApsApsTps(5m)CpsGpsApslnApsmoeGpslnTpsmoeGpsmoe(5m)C |
| ASO-1181 | 1202 | monGalNAc4-p-moeGpsmoe(5m)CpsmoeApsmoeGpsmoeApsGpsGpsTpsGps |
| | | ApsmXpsGps(5m)CpsGpsApsmoeApsmoeGpslnTpslnGpsmoe(5m)C |
| ASO-1182 | 1203 | moe(5m)CpsmoeApsmoeGpsmoeApsmoeGpsGpsTpsGpsApsApsGps(5m)Cps |
| | | GpsApsApsmGpss?moeTpsmGpsmoe(5m)CpsmA |
| ASO-1183 | 1204 | moe(5m)CpsmoeApsmoeGpsmoeApsmoeGpsGpsTpsGpsApsApsGps(5m)Cps |
| | | GpsApsApsmGpsr?moeTpsmGpsmoe(5m)CpsmA |
| ASO-1184 | 1205 | moe(5m)CpsmoeApsmoeGpsmoeApsmoeGpsGpsTpsGpsApsApsGps(5m)Cps |
| | | GpsApsApsmGpsmoeTpsmGpss?moe(5m)CpsmA |
| ASO-1185 | 1206 | moe(5m)CpsmoeApsmoeGpsmoeApsmoeGpsGpsTpsGpsApsApsGps(5m)Cps |
| | | GpsApsApsmGpsmoeTpsmGpsr?moe(5m)CpsmA |
| ASO-1186 | 1207 | moe(5m)CpsmoeApsmoeGpsmoeApsmoeGpsGpsTpsGpsApsApsGps(5m)Cps |
| | | GpsApsApsmGpss?moeTpsmGpss?moe(5m)CpsmA |
| ASO-1187 | 1208 | moe(5m)CpsmoeApsmoeGpsmoeApsmoeGpsGpsTpsGpsApsApsGps(5m)Cps |
| | | GpsApsApsmGpsr?moeTpsmGpsr?moe(5m)CpsmA |
| ASO-1188 | 1209 | moe(5m)CpsmoeApsmoeGpsmoeApsmoeGpsGpsTpsGpsApsApsGps(5m)Cps |
| | | GpsApsApsmGpss?moeTpsmGpsr?moe(5m)CpsmA |
| ASO-1189 | 1210 | moe(5m)CpsmoeApsmoeGpsmoeApsmoeGpsGpsTpsGpsApsApsGps(5m)Cps |
| | | GpsApsApsmGpsr?moeTpsmGpss?moe(5m)CpsmA |
| ASO-1190 | 1211 | moeGpsmoeCpsmoeApsmoeGpsApsGpsGpsTpsGpsmoeApsApsGpsdCpsGps |
| | | ApsmoeApslnApsmoeTpslnGpslnC |
| ASO-1191 | 1212 | moeGpsmoe(5m)CpsmoeApsmoeGpslnApsGpsGpsTpsGpsApsdXpsGps(5m) |
| | | CpsGpsApsmoeApsmoeGpslnTpsmoeGpsmoe(5m)C |
| ASO-1192 | 1213 | moeGpsmoe(5m)CpsmoeApsmoeGpsmoeApsGpsGpsTpsGpsApsdXpsGps |
| | | (5m)CpsGpsApsmoeApsmoeGpslnTpslnGpsmoe(5m)C |
| ASO-1193 | 1214 | moeGpsmoe(5m)CpsmoeApsmoeGpsmoeApsGpsGpsTpsGpsApsdXpsGps |
| | | (5m)CpsGpsApsmoeApsmoeGpslnTpsmoeGpsln(5m)C |
| ASO-1194 | 1215 | monGalNAc4-p-moeGpsmoe(5m)CpslnApsmoeGpsmoeApsGpsGpsTpsGps |
| | | ApsmXpsGps(5m)CpsGpsApsmoeApsmoeGpslnTpsmoeGpsmoe(5m)C |
| ASO-1195 | 1216 | monGalNAc4-p-moeGpsmoe(5m)CpsmoeApsmoeGpsmoeApsGpsGpsTpsGps |
| | | TpsApsGps(5m)CpsGpsApsmoeApsmoeGpsmoeTpsmoeGpsmoe(5m)C |
| ASO-1196 | 1217 | moeGpsln(5m)CpsmoeApsmoeGpsmoeApsGpsGpsTpsGpsApsdXpsGps(5m) |
| | | CpsGpsApslnApsmoeGpsmoeTpsmoeGpsmoe(5m)C |
| ASO-1197 | 1218 | moeGpsmoe(5m)CpslnApsmoeGpsmoeApsGpsGpsTpsGpsApsdXpsGps(5m) |
| | | CpsGpsApsmoeApsmoeGpslnTpsmoeGpsmoe(5m)C |
| ASO-1198 | 1219 | moeGpsmoe(5m)CpsmoeApsmoeGpsmoeApsGpsGpsTpsGpsApsdXpsGps |
| | | (5m)CpsGpsApslnApsmoeGpsmoeTpslnGpsmoe(5m)C |
| ASO-1199 | 1220 | moeGpsmoe(5m)CpsmoeApslnGpsmoeApsGpsGpsTpsGpsApsdXpsGps(5m) |
| | | CpsGpsApsmoeApsmoeGpslnTpsmoeGpsmoe(5m)C |
| ASO-1200 | 1221 | lnGpsmoe(5m)CpsmoeApsmoeGpsmoeApsGpsGpsTpsGpsApsdXpsGps(5m) |
| | | CpsGpsApsmoeApsmoeGpsmoeTpsmoeGpsmoe(5m)C |
| ASO-1201 | 1222 | moeGpsln(5m)CpsmoeApsmoeGpsmoeApsGpsGpsTpsGpsApsdXpsGps(5m) |
| | | CpsGpsApsmoeApsmoeGpsmoeTpsmoeGpsmoe(5m)C |
| ASO-1202 | 1223 | moeGpsmoe(5m)CpslnApsmoeGpsmoeApsGpsGpsTpsGpsApsdXpsGps(5m) |
| | | CpsGpsApsmoeApsmoeGpsmoeTpsmoeGpsmoe(5m)C |
| ASO-1203 | 1224 | moeGpsmoe(5m)CpsmoeApslnGpsmoeApsGpsGpsTpsGpsApsdXpsGps(5m) |
| | | CpsGpsApsmoeApsmoeGpsmoeTpsmoeGpsmoe(5m)C |
| ASO-1204 | 1225 | moeGpsmoe(5m)CpsmoeApsmoeGpslnApsGpsGpsTpsGpsApsdXpsGps(5m) |
| | | CpsGpsApsmoeApsmoeGpsmoeTpsmoeGpsmoe(5m)C |
| ASO-1205 | 1226 | moeGpsmoe(5m)CpsmoeApsmoeGpsmoeApsGpsGpsTpsGpsApsdXpsGps |
| | | (5m)CpsGpsApslnApsmoeGpsmoeTpsmoeGpsmoe(5m)C |
| ASO-1206 | 1227 | moeGpsmoe(5m)CpsmoeApsmoeGpsmoeApsGpsGpsTpsGpsApsdXpsGps |
| | | (5m)CpsGpsApsmoeApslnGpsmoeTpsmoeGpsmoe(5m)C |
| ASO-1207 | 1228 | moeGpsmoe(5m)CpsmoeApsmoeGpsmoeApsGpsGpsTpsGpsApsdXpsGps |
| | | (5m)CpsGpsApsmoeApsmoeGpslnTpsmoeGpsmoe(5m)C |
| ASO-1208 | 1229 | moeGpsmoe(5m)CpsmoeApsmoeGpsmoeApsGpsGpsTpsGpsApsdXpsGps |
| | | (5m)CpsGpsApsmoeApsmoeGpsmoeTpslnGpsmoe(5m)C |
| ASO-1209 | 1230 | moeGpsmoe(5m)CpsmoeApsmoeGpsmoeApsGpsGpsTpsGpsApsdXpsGps |
| | | (5m)CpsGpsApsmoeApsmoeGpsmoeTpsmoeGpsln(5m)C |
| ASO-1210 | 1231 | lnGpsln(5m)CpsmoeApsmoeGpsmoeApsGpsGpsTpsGpsApsdXpsGps(5m)Cps |
| | | GpsApsmoeApsmoeGpsmoeTpsmoeGpsmoe(5m)C |
| ASO-1211 | 1232 | lnGpsmoe(5m)CpslnApsmoeGpsmoeApsGpsGpsTpsGpsApsdXpsGps(5m)Cps |
| | | GpsApsmoeApsmoeGpsmoeTpsmoeGpsmoe(5m)C |
| ASO-1212 | 1233 | lnGpsmoe(5m)CpsmoeApslnGpsmoeApsGpsGpsTpsGpsApsdXpsGps(5m)Cps |
| | | GpsApsmoeApsmoeGpsmoeTpsmoeGpsmoe(5m)C |
| ASO-1213 | 1234 | lnGpsmoe(5m)CpsmoeApsmoeGpslnApsGpsGpsTpsGpsApsdXpsGps(5m)Cps |
| | | GpsApsmoeApsmoeGpsmoeTpsmoeGpsmoe(5m)C |
| ASO-1214 | 1235 | lnGpsmoe(5m)CpsmoeApsmoeGpsmoeApsGpsGpsTpsGpsApsdXpsGps(5m) |
| | | CpsGpsApslnApsmoeGpsmoeTpsmoeGpsmoe(5m)C |
| ASO-1215 | 1236 | lnGpsmoe(5m)CpsmoeApsmoeGpsmoeApsGpsGpsTpsGpsApsdXpsGps(5m) |
| | | CpsGpsApsmoeApslnGpsmoeTpsmoeGpsmoe(5m)C |
| ASO-1216 | 1237 | lnGpsmoe(5m)CpsmoeApsmoeGpsmoeApsGpsGpsTpsGpsApsdXpsGps(5m) |
| | | CpsGpsApsmoeApsmoeGpslnTpsmoeGpsmoe(5m)C |
| ASO-1217 | 1238 | lnGpsmoe(5m)CpsmoeApsmoeGpsmoeApsGpsGpsTpsGpsApsdXpsGps(5m) |
| | | CpsGpsApsmoeApsmoeGpsmoeTpslnGpsmoe(5m)C |
| ASO-1218 | 1239 | lnGpsmoe(5m)CpsmoeApsmoeGpsmoeApsGpsGpsTpsGpsApsdXpsGps(5m) |
| | | CpsGpsApsmoeApsmoeGpsmoeTpsmoeGpsln(5m)C |
| ASO-1219 | 1240 | moeGpsln(5m)CpslnApsmoeGpsmoeApsGpsGpsTpsGpsApsdXpsGps(5m)Cps |
| | | GpsApsmoeApsmoeGpsmoeTpsmoeGpsmoe(5m)C |
| ASO-1220 | 1241 | moeGpsln(5m)CpsmoeApslnGpsmoeApsGpsGpsTpsGpsApsdXpsGps(5m)Cps |
| | | GpsApsmoeApsmoeGpsmoeTpsmoeGpsmoe(5m)C |
| ASO-1221 | 1242 | moeGpsln(5m)CpsmoeApsmoeGpslnApsGpsGpsTpsGpsApsdXpsGps(5m)Cps |
| | | GpsApsmoeApsmoeGpsmoeTpsmoeGpsmoe(5m)C |
| ASO-1222 | 1243 | moeGpsln(5m)CpsmoeApsmoeGpsmoeApsGpsGpsTpsGpsApsdXpsGps(5m) |
| | | CpsGpsApsmoeApslnGpsmoeTpsmoeGpsmoe(5m)C |
| ASO-1223 | 1244 | moeGpsln(5m)CpsmoeApsmoeGpsmoeApsGpsGpsTpsGpsApsdXpsGps(5m) |
| | | CpsGpsApsmoeApsmoeGpslnTpsmoeGpsmoe(5m)C |
| ASO-1224 | 1245 | moeGpsln(5m)CpsmoeApsmoeGpsmoeApsGpsGpsTpsGpsApsdXpsGps(5m) |
| | | CpsGpsApsmoeApsmoeGpsmoeTpslnGpsmoe(5m)C |
| ASO-1225 | 1246 | moeGpsln(5m)CpsmoeApsmoeGpsmoeApsGpsGpsTpsGpsApsdXpsGps(5m) |
| | | CpsGpsApsmoeApsmoeGpsmoeTpsmoeGpsln(5m)C |
| ASO-1226 | 1247 | moeGpsmoe(5m)CpslnApslnGpsmoeApsGpsGpsTpsGpsApsdXpsGps(5m)Cps |
| | | GpsApsmoeApsmoeGpsmoeTpsmoeGpsmoe(5m)C |
| ASO-1227 | 1248 | moeGpsmoe(5m)CpslnApsmoeGpsmoeApsGpsGpsTpsGpsApsdXpsGps(5m) |
| | | CpsGpsApslnApsmoeGpsmoeTpsmoeGpsmoe(5m)C |
| ASO-1228 | 1249 | moeGpsmoe(5m)CpslnApsmoeGpsmoeApsGpsGpsTpsGpsApsdXpsGps(5m) |
| | | CpsGpsApsmoeApslnGpsmoeTpsmoeGpsmoe(5m)C |
| ASO-1229 | 1250 | moeGpsmoe(5m)CpslnApsmoeGpsmoeApsGpsGpsTpsGpsApsdXpsGps(5m) |
| | | CpsGpsApsmoeApsmoeGpsmoeTpslnGpsmoe(5m)C |
| ASO-1230 | 1251 | moeGpsmoe(5m)CpslnApsmoeGpsmoeApsdGpsdGpsdTpsdGpsdApsdXpsd |
| | | Gpsd(5m)CpsdGpsdApsmoeApsmoeGpsmoeTpsmoeGpsln(5m)C |
| ASO-1231 | 1252 | moeGpsmoe(5m)CpsmoeApslnGpsmoeApsdGpsdGpsdTpsdGpsdApsdXpsd |
| | | Gpsd(5m)CpsdGpsdApsmoeApslnGpsmoeTpsmoeGpsmoe(5m)C |
| ASO-1232 | 1253 | moeGpsmoe(5m)CpsmoeApslnGpsmoeApsdGpsdGpsdTpsdGpsdApsdXpsd |
| | | Gpsd(5m)CpsdGpsdApsmoeApsmoeGpsmoeTpslnGpsmoe(5m)C |
| ASO-1233 | 1254 | moeGpsmoe(5m)CpsmoeApslnGpsmoeApsdGpsdGpsdTpsdGpsdApsdXpsd |
| | | Gpsd(5m)CpsdGpsdApsmoeApsmoeGpsmoeTpsmoeGpsln(5m)C |
| ASO-1234 | 1255 | moeGpsmoe(5m)CpsmoeApsmoeGpslnApsdGpsdGpsdTpsdGpsdApsdXpsd |
| | | Gpsd(5m)CpsdGpsdApsmoeApslnGpsmoeTpsmoeGpsmoe(5m)C |
| ASO-1235 | 1256 | moeGpsmoe(5m)CpsmoeApsmoeGpsmoeApsdGpsdGpsdTpsdGpsdApsdXpsd |
| | | Gpsd(5m)CpsdGpsdApslnApsmoeGpsmoeTpsmoeGpsln(5m)C |
| ASO-1236 | 1257 | moeGpsmoe(5m)CpsmoeApsmoeGpsmoeApsdGpsdGpsdTpsdGpsdApsdXpsd |
| | | Gpsd(5m)CpsdGpsdApsmoeApslnGpslnTpsmoeGpsmoe(5m)C |
| ASO-1237 | 1258 | moeGpsmoe(5m)CpsmoeApsmoeGpsmoeApsdGpsdGpsdTpsdGpsdApsdXpsd |
| | | Gpsd(5m)CpsdGpsdApsmoeApslnGpsmoeTpslnGpsmoe(5m)C |
| ASO-1238 | 1259 | moeGpsmoe(5m)CpsmoeApsmoeGpsmoeApsdGpsdGpsdTpsdGpsdApsdXpsd |
| | | Gpsd(5m)CpsdGpsdApsmoeApslnGpsmoeTpsmoeGpsln(5m)C |
| ASO-1239 | 1260 | moeGpsmoe(5m)CpsmoeApsmoeGpsmoeApsdGpsdGpsdTpsdGpsdApsdXpsd |
| | | Gpsd(5m)CpsdGpsdApsmoeApsmoeGpsmoeTpslnGpsln(5m)C |
| ASO-1240 | 1261 | monGalNAc4-p-moeGpsmoe(5m)CpsmoeApsmoeGpslnApsGpsGpsTpsGps |
| | | ApsmXpsGps(5m)CpsGpsApsmoeApsmoeGpslnTpsmoeGpsmoe(5m)C |
| ASO-1241 | 1262 | monGalNAc4-p-moeGpsmoe(5m)CpsmoeApslnGpsmoeApsGpsGpsTpsGps |
| | | ApsdXpsGps(5m)CpsGpsApslnApsmoeGpsmoeTpsmoeGpsmoe(5m)C |
| ASO-1242 | 1263 | monGalNAc4-p-moeGpsmoe(5m)CpsmoeApsmoeGpsmoeApsGpsGpsTpsGps |
| | | ApsdXpsGps(5m)CpsGpsApslnApsmoeGpslnTpsmoeGpsmoe(5m)C |
| ASO-1243 | 1264 | monGalNAc4-p-moeGpsln(5m)CpsmoeApsmoeGpsmoeApsGpsGpsTpsGps |
| | | ApsmXpsGps(5m)CpsGpsApslnApsmoeGpsmoeTpsmoeGpsmoe(5m)C |
| ASO-1244 | 1265 | monGalNAc4-p-moeGpsmoe(5m)CpsmoeApsmoeGpsmoeApsGpsGpsTpsGps |
| | | ApsdXpsGps(5m)CpsGpsApsmoeApsmoeGpsmoeTpsmoeGpsmoe(5m)C |
| ASO-1245 | 1266 | moeGpsmoe(5m)CpsmoeApsmoeGpslnApsGpsGpsTpsGpsApsdXpsGps(5m) |
| | | CpsGpsApsmoeApsmoeGpsmoeTpsmoeGpsln(5m)C |
| ASO-1246 | 1267 | moeGpsmoe(5m)CpsmoeApsmoeGpsmoeApsGpsGpsTpsGpsApsdXpsGps |
| | | (5m)CpsGpsApslnApslnGpsmoeTpsmoeGpsmoe(5m)C |
| ASO-1247 | 1268 | monGalNAc4-p-moeGpsmoe(5m)CpsmoeApsmoeGpsmoeApsGpsGpsTpsGps |
| | | ApsmXpsGps(5m)CpsGpsApslnApsmoeGpsmoeTpslnGpsmoe(5m)C |
| ASO-1248 | 1269 | monGalNAc4-p-moeGpsmoe(5m)CpslnApsmoeGpslnApsGpsGpsTpsGpsApsd |
| | | XpsGps(5m)CpsGpsApsmoeApsmoeGpsmoeTpsmoeGpsmoe(5m)C |
| ASO-1249 | 1270 | moeGpsmoe(5m)CpsmoeApsmoeGpsmoeApsmoeXpsGpsTpsGpsApsApsGps |
| | | (5m)CpsGpsApsmoeApsmoeGpsmoeTpsmoeGpsmoe(5m)C |
| ASO-1250 | 1271 | moeGpsmoe(5m)CpsmoeApsmoeGpsmoeApsGpsmoeXpsTpsGpsApsApsGps |
| | | (5m)CpsGpsApsmoeApsmoeGpsmoeTpsmoeGpsmoe(5m)C |
| ASO-1251 | 1272 | moeGpsmoe(5m)CpsmoeApsmoeGpsmoeApsGpsGpsmoeXpsGpsApsApsGps |
| | | (5m)CpsGpsApsmoeApsmoeGpsmoeTpsmoeGpsmoe(5m)C |
| ASO-1252 | 1273 | moeGpsmoe(5m)CpsmoeApsmoeGpsmoeApsGpsGpsTpsmoeXpsApsApsGps |
| | | (5m)CpsGpsApsmoeApsmoeGpsmoeTpsmoeGpsmoe(5m)C |
| ASO-1253 | 1274 | moeGpsmoe(5m)CpsmoeApsmoeGpsmoeApsGpsGpsTpsGpsmoeXpsApsGps |
| | | (5m)CpsGpsApsmoeApsmoeGpsmoeTpsmoeGpsmoe(5m)C |
| ASO-1254 | 1275 | moeGpsmoe(5m)CpsmoeApsmoeGpsmoeApsGpsGpsTpsGpsApsmoeXpsGps |
| | | (5m)CpsGpsApsmoeApsmoeGpsmoeTpsmoeGpsmoe(5m)C |
| ASO-1255 | 1276 | moeGpsmoe(5m)CpsmoeApsmoeGpsmoeApsGpsGpsTpsGpsApsApsmoeXps |
| | | (5m)CpsGpsApsmoeApsmoeGpsmoeTpsmoeGpsmoe(5m)C |
| ASO-1256 | 1277 | moeGpsmoe(5m)CpsmoeApsmoeGpsmoeApsGpsGpsTpsGpsApsApsGpsmoe |
| | | XpsGpsApsmoeApsmoeGpsmoeTpsmoeGpsmoe(5m)C |
| ASO-1257 | 1278 | moeGpsmoe(5m)CpsmoeApsmoeGpsmoeApsGpsGpsTpsGpsApsApsGps(5m) |
| | | CpsmoeXpsApsmoeApsmoeGpsmoeTpsmoeGpsmoe(5m)C |
| ASO-1258 | 1279 | moeGpsmoe(5m)CpsmoeApsmoeGpsmoeApsGpsGpsTpsGpsApsApsGps(5m) |
| | | CpsGpsmoeXpsmoeApsmoeGpsmoeTpsmoeGpsmoe(5m)C |
| ASO-1259 | 1280 | moeGpsmoe(5m)CpsmoeApsmoeGpsmoeApsGpsGpsTpsGpsApsApsGpsln |
| | | XpsGpsApsmoeApsmoeGpsmoeTpsmoeGpsmoe(5m)C |
| ASO-1260 | 1281 | moeGpsmoe(5m)CpsmoeApsmoeGpsmoeApsGpsGpsTpsGpsApsApslnXps |
| | | (5m)CpsGpsApsmoeApsmoeGpsmoeTpsmoeGpsmoe(5m)C |
| ASO-1261 | 1282 | moeGpsmoe(5m)CpsmoeApsmoeGpsmoeApsGpsGpsTpsGpsApslnXpsGps |
| | | (5m)CpsGpsApsmoeApsmoeGpsmoeTpsmoeGpsmoe(5m)C |
| ASO-1262 | 1283 | moeGpsmoe(5m)CpsmoeApsmoeGpsmoeApsGpsGpsTpsGpslnXpsApsGps |
| | | (5m)CpsGpsApsmoeApsmoeGpsmoeTpsmoeGpsmoe(5m)C |
| ASO-1263 | 1284 | moeGpsmoe(5m)CpsmoeApsmoeGpsmoeApsGpsGpsTpslnXpsApsApsGps |
| | | (5m)CpsGpsApsmoeApsmoeGpsmoeTpsmoeGpsmoe(5m)C |
| ASO-1264 | 1285 | moeGpsmoe(5m)CpsmoeApsmoeGpsmoeApsGpsGpslnXpsGpsApsApsGps |
| | | (5m)CpsGpsApsmoeApsmoeGpsmoeTpsmoeGpsmoe(5m)C |
| ASO-1265 | 1286 | moeGpsmoe(5m)CpsmoeApsmoeGpsmoeApsGpslnXpsTpsGpsApsApsGps |
| | | (5m)CpsGpsApsmoeApsmoeGpsmoeTpsmoeGpsmoe(5m)C |
| ASO-1266 | 1287 | moeGpsmoe(5m)CpsmoeApsmoeGpsmoeApslnXpsGpsTpsGpsApsApsGps |
| | | (5m)CpsGpsApsmoeApsmoeGpsmoeTpsmoeGpsmoe(5m)C |
| ASO-1267 | 1288 | moeGpsmoe(5m)CpsmoeApsmoeGpsmoeApsGpsGpsTpsGpsApsApsGps(5m) |
| | | CpsGpslnXpsmoeApsmoeGpsmoeTpsmoeGpsmoe(5m)C |
| ASO-1268 | 1289 | moeGpsmoe(5m)CpsmoeApsmoeGpsmoeApsGpsGpsTpsGpsApsApsGps(5m) |
| | | CpslnXpsApsmoeApsmoeGpsmoeTpsmoeGpsmoe(5m)C |
| ASO-1269 | 1290 | moeGpsmoe(5m)CpsmoeApslnGpsmoeApsGpsGpsTpsGpsmXpsApsGps(5m) |
| | | CpsGpsApsmoeApsmoeGpsmoeTpsmoeGpsmoe(5m)C |
| ASO-1270 | 1291 | moeGpsmoe(5m)CpslnApsmoeGpsmoeApsGpsGpsTpsGpsmXpsApsGps(5m) |
| | | CpsGpsApsmoeApsmoeGpsmoeTpsmoeGpsmoe(5m)C |
| ASO-1271 | 1292 | moeGpsln(5m)CpsmoeApsmoeGpsmoeApsGpsGpsTpsGpsmXpsApsGps(5m) |
| | | CpsGpsApsmoeApsmoeGpsmoeTpsmoeGpsmoe(5m)C |
| ASO-1272 | 1293 | lnGpsmoe(5m)CpsmoeApsmoeGpsmoeApsGpsGpsTpsGpsmXpsApsGps(5m) |
| | | CpsGpsApsmoeApsmoeGpsmoeTpsmoeGpsmoe(5m)C |
| ASO-1273 | 1294 | moeGpsmoe(5m)CpslnApsmoeGpsmoeApsGpsGpsTpsGpsmXpsApsGps(5m) |
| | | CpsGpsApsmoeApsmoeGpsmoeTpsmoeGpsln(5m)C |
| ASO-1274 | 1295 | moeGpsmoe(5m)CpslnApsmoeGpsmoeApsGpsGpsTpsGpsmXpsApsGps(5m) |
| | | CpsGpsApsmoeApsmoeGpsmoeTpslnGpsmoe(5m)C |
| ASO-1275 | 1296 | moeGpsmoe(5m)CpslnApsmoeGpsmoeApsGpsGpsTpsGpsmXpsApsGps(5m) |
| | | CpsGpsApsmoeApsmoeGpslnTpsmoeGpsmoe(5m)C |
| ASO-1276 | 1297 | moeGpsmoe(5m)CpslnApsmoeGpsmoeApsGpsGpsTpsGpsmXpsApsGps(5m) |
| | | CpsGpsApsmoeApslnGpsmoeTpsmoeGpsmoe(5m)C |
| ASO-1277 | 1298 | moeGpsmoe(5m)CpslnApsmoeGpsmoeApsGpsGpsTpsGpsmXpsApsGps(5m) |
| | | CpsGpsApslnApsmoeGpsmoeTpsmoeGpsmoe(5m)C |
| ASO-1278 | 1299 | moeGpsmoe(5m)CpslnApsmoeGpslnApsGpsGpsTpsGpsmXpsApsGps(5m)Cps |
| | | GpsApsmoeApsmoeGpsmoeTpsmoeGpsmoe(5m)C |
| ASO-1279 | 1300 | moeGpsmoe(5m)CpslnApslnGpsmoeApsGpsGpsTpsGpsmXpsApsGps(5m)Cps |
| | | GpsApsmoeApsmoeGpsmoeTpsmoeGpsmoe(5m)C |
| ASO-1280 | 1301 | moeGpsln(5m)CpsmoeApsmoeGpsmoeApsGpsGpsTpsGpsmXpsApsGps(5m) |
| | | CpsGpsApsmoeApsmoeGpsmoeTpsmoeGpsln(5m)C |
| ASO-1281 | 1302 | moeGpsln(5m)CpsmoeApsmoeGpsmoeApsGpsGpsTpsGpsmXpsApsGps(5m) |
| | | CpsGpsApsmoeApsmoeGpsmoeTpslnGpsmoe(5m)C |
| ASO-1282 | 1303 | moeGpsln(5m)CpsmoeApsmoeGpsmoeApsGpsGpsTpsGpsmXpsApsGps(5m) |
| | | CpsGpsApsmoeApsmoeGpslnTpsmoeGpsmoe(5m)C |
| ASO-1283 | 1304 | moeGpsln(5m)CpsmoeApsmoeGpsmoeApsGpsGpsTpsGpsmXpsApsGps(5m) |
| | | CpsGpsApsmoeApslnGpsmoeTpsmoeGpsmoe(5m)C |
| ASO-1284 | 1305 | moeGpsln(5m)CpsmoeApsmoeGpsmoeApsGpsGpsTpsGpsmXpsApsGps(5m) |
| | | CpsGpsApslnApsmoeGpsmoeTpsmoeGpsmoe(5m)C |
| ASO-1285 | 1306 | moeGpsln(5m)CpsmoeApsmoeGpslnApsGpsGpsTpsGpsmXpsApsGps(5m)Cps |
| | | GpsApsmoeApsmoeGpsmoeTpsmoeGpsmoe(5m)C |
| ASO-1286 | 1307 | moeGpsln(5m)CpsmoeApslnGpsmoeApsGpsGpsTpsGpsmXpsApsGps(5m)Cps |
| | | GpsApsmoeApsmoeGpsmoeTpsmoeGpsmoe(5m)C |
| ASO-1287 | 1308 | moeGpsln(5m)CpslnApsmoeGpsmoeApsGpsGpsTpsGpsmXpsApsGps(5m)Cps |
| | | GpsApsmoeApsmoeGpsmoeTpsmoeGpsmoe(5m)C |
| ASO-1288 | 1309 | lnGpsmoe(5m)CpsmoeApsmoeGpsmoeApsGpsGpsTpsGpsmXpsApsGps(5m) |
| | | CpsGpsApsmoeApsmoeGpsmoeTpsmoeGpsln(5m)C |
| ASO-1289 | 1310 | lnGpsmoe(5m)CpsmoeApsmoeGpsmoeApsGpsGpsTpsGpsmXpsApsGps(5m) |
| | | CpsGpsApsmoeApsmoeGpsmoeTpslnGpsmoe(5m)C |
| ASO-1290 | 1311 | lnGpsmoe(5m)CpsmoeApsmoeGpsmoeApsGpsGpsTpsGpsmXpsApsGps(5m) |
| | | CpsGpsApsmoeApsmoeGpslnTpsmoeGpsmoe(5m)C |
| ASO-1291 | 1312 | lnGpsmoe(5m)CpsmoeApsmoeGpsmoeApsGpsGpsTpsGpsmXpsApsGps(5m) |
| | | CpsGpsApsmoeApslnGpsmoeTpsmoeGpsmoe(5m)C |
| ASO-1292 | 1313 | lnGpsmoe(5m)CpsmoeApsmoeGpsmoeApsGpsGpsTpsGpsmXpsApsGps(5m) |
| | | CpsGpsApslnApsmoeGpsmoeTpsmoeGpsmoe(5m)C |
| ASO-1293 | 1314 | lnGpsmoe(5m)CpsmoeApsmoeGpslnApsGpsGpsTpsGpsmXpsApsGps(5m)Cps |
| | | GpsApsmoeApsmoeGpsmoeTpsmoeGpsmoe(5m)C |
| ASO-1294 | 1315 | lnGpsmoe(5m)CpsmoeApslnGpsmoeApsGpsGpsTpsGpsmXpsApsGps(5m)Cps |
| | | GpsApsmoeApsmoeGpsmoeTpsmoeGpsmoe(5m)C |
| ASO-1295 | 1316 | lnGpsmoe(5m)CpslnApsmoeGpsmoeApsGpsGpsTpsGpsmXpsApsGps(5m)Cps |
| | | GpsApsmoeApsmoeGpsmoeTpsmoeGpsmoe(5m)C |
| ASO-1296 | 1317 | lnGpsln(5m)CpsmoeApsmoeGpsmoeApsGpsGpsTpsGpsmXpsApsGps(5m)Cps |
| | | GpsApsmoeApsmoeGpsmoeTpsmoeGpsmoe(5m)C |
| ASO-1297 | 1318 | moeGpsmoe(5m)CpsmoeApsmoeGpsmoeApsGpsGpsTpsGpsmXpsApsGps |
| | | (5m)CpsGpsApsmoeApsmoeGpsmoeTpsmoeGpsln(5m)C |
| ASO-1298 | 1319 | moeGpsmoe(5m)CpsmoeApsmoeGpsmoeApsGpsGpsTpsGpsmXpsApsGps |
| | | (5m)CpsGpsApsmoeApsmoeGpsmoeTpslnGpsmoe(5m)C |
| ASO-1299 | 1320 | moeGpsmoe(5m)CpsmoeApsmoeGpsmoeApsGpsGpsTpsGpsmXpsApsGps |
| | | (5m)CpsGpsApsmoeApsmoeGpslnTpsmoeGpsmoe(5m)C |
| ASO-1300 | 1321 | moeGpsmoe(5m)CpsmoeApsmoeGpsmoeApsGpsGpsTpsGpsmXpsApsGps |
| | | (5m)CpsGpsApsmoeApslnGpsmoeTpsmoeGpsmoe(5m)C |
| ASO-1301 | 1322 | moeGpsmoe(5m)CpsmoeApsmoeGpsmoeApsGpsGpsTpsGpsmXpsApsGps |
| | | (5m)CpsGpsApslnApsmoeGpsmoeTpsmoeGpsmoe(5m)C |
| ASO-1302 | 1323 | moeGpsmoe(5m)CpsmoeApsmoeGpslnApsGpsGpsTpsGpsmXpsApsGps(5m) |
| | | CpsGpsApsmoeApsmoeGpsmoeTpsmoeGpsmoe(5m)C |
| ASO-1303 | 1324 | moeGpsmoe(5m)CpsmoeApslnGpslnApsGpsGpsTpsGpsmXpsApsGps(5m)Cps |
| | | GpsApsmoeApsmoeGpsmoeTpsmoeGpsmoe(5m)C |
| ASO-1304 | 1325 | moeGpsmoe(5m)CpsmoeApslnGpsmoeApsGpsGpsTpsGpsmXpsApsGps(5m) |
| | | CpsGpsApslnApsmoeGpsmoeTpsmoeGpsmoe(5m)C |
| ASO-1305 | 1326 | moeGpsmoe(5m)CpsmoeApslnGpsmoeApsGpsGpsTpsGpsmXpsApsGps(5m) |
| | | CpsGpsApsmoeApslnGpsmoeTpsmoeGpsmoe(5m)C |
| ASO-1306 | 1327 | moeGpsmoe(5m)CpsmoeApslnGpsmoeApsGpsGpsTpsGpsmXpsApsGps(5m) |
| | | CpsGpsApsmoeApsmoeGpslnTpsmoeGpsmoe(5m)C |
| ASO-1307 | 1328 | moeGpsmoe(5m)CpsmoeApslnGpsmoeApsGpsGpsTpsGpsmXpsApsGps(5m) |
| | | CpsGpsApsmoeApsmoeGpsmoeTpslnGpsmoe(5m)C |
| ASO-1308 | 1329 | moeGpsmoe(5m)CpsmoeApslnGpsmoeApsGpsGpsTpsGpsmXpsApsGps(5m) |
| | | CpsGpsApsmoeApsmoeGpsmoeTpsmoeGpsln(5m)C |
| ASO-1309 | 1330 | moeGpsmoe(5m)CpsmoeApsmoeGpslnApsGpsGpsTpsGpsmXpsApsGps(5m) |
| | | CpsGpsApslnApsmoeGpsmoeTpsmoeGpsmoe(5m)C |
| ASO-1310 | 1331 | moeGpsmoe(5m)CpsmoeApsmoeGpslnApsGpsGpsTpsGpsmXpsApsGps(5m) |
| | | CpsGpsApsmoeApslnGpsmoeTpsmoeGpsmoe(5m)C |
| ASO-1311 | 1332 | moeGpsmoe(5m)CpsmoeApsmoeGpslnApsGpsGpsTpsGpsmXpsApsGps(5m) |
| | | CpsGpsApsmoeApsmoeGpslnTpsmoeGpsmoe(5m)C |
| ASO-1312 | 1333 | moeGpsmoe(5m)CpsmoeApsmoeGpslnApsGpsGpsTpsGpsmXpsApsGps(5m) |
| | | CpsGpsApsmoeApsmoeGpsmoeTpslnGpsmoe(5m)C |
| ASO-1313 | 1334 | moeGpsmoe(5m)CpsmoeApsmoeGpslnApsGpsGpsTpsGpsmXpsApsGps(5m) |
| | | CpsGpsApsmoeApsmoeGpsmoeTpsmoeGpsln(5m)C |
| ASO-1314 | 1335 | moeGpsmoe(5m)CpsmoeApsmoeGpsmoeApsGpsGpsTpsGpsmXpsApsGps |
| | | (5m)CpsGpsApslnApslnGpsmoeTpsmoeGpsmoe(5m)C |
| ASO-1315 | 1336 | moeGpsmoe(5m)CpsmoeApsmoeGpsmoeApsGpsGpsTpsGpsmXpsApsGps |
| | | (5m)CpsGpsApslnApsmoeGpslnTpsmoeGpsmoe(5m)C |
| ASO-1316 | 1337 | moeGpsmoe(5m)CpsmoeApsmoeGpsmoeApsGpsGpsTpsGpsmXpsApsGps |
| | | (5m)CpsGpsApslnApsmoeGpsmoeTpslnGpsmoe(5m)C |
| ASO-1317 | 1338 | moeGpsmoe(5m)CpsmoeApsmoeGpsmoeApsGpsGpsTpsGpsmXpsApsGps |
| | | (5m)CpsGpsApslnApsmoeGpsmoeTpsmoeGpsln(5m)C |
| ASO-1318 | 1339 | moeGpsmoe(5m)CpsmoeApsmoeGpsmoeApsGpsGpsTpsGpsmXpsApsGps |
| | | (5m)CpsGpsApsmoeApslnGpslnTpsmoeGpsmoe(5m)C |
| ASO-1319 | 1340 | moeGpsmoe(5m)CpsmoeApsmoeGpsmoeApsGpsGpsTpsGpsmXpsApsGps |
| | | (5m)CpsGpsApsmoeApslnGpsmoeTpslnGpsmoe(5m)C |
| ASO-1320 | 1341 | moeGpsmoe(5m)CpsmoeApsmoeGpsmoeApsGpsGpsTpsGpsmXpsApsGps |
| | | (5m)CpsGpsApsmoeApslnGpsmoeTpsmoeGpsln(5m)C |
| ASO-1321 | 1342 | moeGpsmoe(5m)CpsmoeApsmoeGpsmoeApsGpsGpsTpsGpsmXpsApsGps |
| | | (5m)CpsGpsApsmoeApsmoeGpslnTpslnGpsmoe(5m)C |
| ASO-1322 | 1343 | moeGpsmoe(5m)CpsmoeApsmoeGpsmoeApsGpsGpsTpsGpsmXpsApsGps |
| | | (5m)CpsGpsApsmoeApsmoeGpslnTpsmoeGpsln(5m)C |
| ASO-1323 | 1344 | moeGpsmoe(5m)CpsmoeApsmoeGpsmoeApsGpsGpsTpsGpsmXpsApsGps |
| | | (5m)CpsGpsApsmoeApsmoeGpsmoeTpslnGpsln(5m)C |

Nucleotides included in Table 1 should be considered deoxynucleotides unless indicated to the contrary. Thus a base identifier (i.e., A, T, G, C, or U) refers to a deoxynucleotide if not modified by another code letter (e.g., r, ocp, lm, etc.). Alternatively, some sequences may also include a ″d″ in addition to the base identifier (e.g., dG, dT, dA, dC, etc.), which is also indicative of a deoxynucleotide. [chemical structure] [chemical structure]
dX = (2′-deoxy Abasic); [chemical structure] [chemical structure]
ps = phosphorothioate linkage;
yp = mesyl phosphoroamidate linkage;
pss? = S-stereo-defined phosphorothioate linkage;
psr? = R-stereo-defined phosphorothioate linkage;
moe = 2′-O-methoxyethyl;
(5m)C = 5 methylcytosine;
mA, mG, mT, mU, m(5m)C and mC = 2′-O-methyl nucleotide;
rA, rG, rC = ribonucleotide;
ocp = 2′-O-cyclopropyl;
lm = 2′-OMe-3′-xylo;
omcp = 2′-O-methylcyclopropyl;
DAP = 2,6-diaminopurine;
(2s)T = 2-thio-thymine;
(8nh)G = 8-amio-guanosine;
(8nh)A = 8-amino-adenosine;
(5oh)C = 5′-hydroxy-cytosine;
ln = LNA;
gutb = tert butyl GuNA;

[chemical structure]

[chemical structure]

TABLE 2

| SEQ ID NO: | Unmodified ASO Sequences |
|---|---|
| 321 | GCAGAGGTGAAGCGAAGTGC |
| 322 | GTGAAGCGAAGTGCACACGG |
| 323 | GGTGAAGCGAAGTGCACACG |
| 324 | AGGTGAAGCGAAGTGCACAC |
| 325 | GAGGTGAAGCGAAGTGCACA |
| 326 | AGAGGTGAAGCGAAGTGCAC |
| 327 | CAGAGGTGAAGCGAAGTGCA |
| 328 | TGCAGAGGTGAAGCGAAGTG |
| 329 | GTGCAGAGGTGAAGCGAAGT |
| 330 | CGTGCAGAGGTGAAGCGAAG |
| 331 | ACGTGCAGAGGTGAAGCGAA |
| 332 | TTGGCAGAGGTGAAGCGAAGTGC |
| 333 | TGTGCAGAGGTGAAGCGAAGTGC |
| 334 | TGCAGAGGTGAAGCGAAGTGC |
| 335 | TTGCAGAGGTGAAGCGAAGTGC |
| 336 | TTTGCAGAGGTGAAGCGAAGTGC |
| 337 | TGGCAGAGGTGAAGCGAAGTGC |
| 338 | TTGTGCAGAGGTGAAGCGAAGTGC |
| 339 | TGTTGTGCAGAGGTGAAGCGAAGTGC |
| 340 | TTATGCAGAGGTGAAGCGAAGTGC |
| 341 | TATTATGCAGAGGTGAAGCGAAGTGC |
| 342 | GCAGAGGTGAAGCGAAGTGCT |
| 343 | GCAGAGGTGAAGCGAAGTGCTT |
| 344 | GCAGAGGTGAAGCGAAGTGCTTT |
| 345 | GCAGAGGTGAAGCGAAGTGCTG |
| 346 | GCAGAGGTGAAGCGAAGTGCTTG |
| 347 | GCAGAGGTGAAGCGAAGTGCTGT |
| 348 | GCDAPGAGGTGAAGCGAAGTGC |
| 349 | GCAGDAPGGTGAAGCGAAGTGC |
| 350 | GCAGAGGTGAAGCGADAPGTGC |
| 351 | CAGAGGTGAAGCGAAGTGC |
| 352 | GCAGAGGTGAAGCGAAGTG |

### III. Antisense Oligonucleotide Functions

[0191] Provided herein are antisense nucleotides that are capable of mediating degradation of RNA transcripts and activating the immune pathways of the subject, while not resulting in elevated levels of cell death.

[0192] Without wishing to be bound by any particular theory, it is believed that ASOs hybridize to target RNA and then mediate degradation of target RNA transcripts via recruitment of RNase H to the DNA/RNA heteroduplex. ASOs may also trigger activation of PRRs and pathways, including TLR8. ASOs may display off-target effects by binding to transcripts other than the target RNA transcript, which may result in cellular toxicity. Binding to proteins within the cells, which may disrupt normal cell function and result in cytotoxicity. Activation of proinflammatory mechanisms by ASOs could also contribute to side effects. Main ASO target organs such as the liver and kidneys, are where the ASO related toxic effects could be more pronounced. Thus, an important consideration when developing ASOs for therapeutic purposes is to balance the performance of the ASO in all these areas to select candidates based on their ability to cause RNA transcript degradation and moderate immune activation while avoiding increased cytotoxicity.

### RNase H Activity

[0193] As provided in the Examples included herein, the disclosed ASO can mediate degradation of target RNA via an RNase H-mediated pathway.

[0194] Antisense oligonucleotides can hybridize to target RNA transcripts to form an ASO/RNA complex. RNase H is recruited to these complexes and cleaves the RNA, resulting in degradation of the transcripts. This RNA transcript degradation results in a reduction of HBV-derived RNAs and viral proteins, which leads to reduced HBV replication and antigen production and could potentially be one key component of combination therapy targeting functional cure for CHB.

[0195] RNase H recruitment is known to be affected by the structure of the ASO, including its sequence and modifications. Thus, modifications of an ASO that may increase its stability can improve in vivo potency.

### TLR8 and Additional TLR Activity

[0196] As provided in the Examples included herein, the disclosed ASO can activate TLR8.

[0197] Toll-like receptor 8 (TLR8) is a receptor that plays a role in the response to chronic viral infections, including HBV infection. TLR8 recognizes single-stranded RNA of viruses or bacteria and triggers production of proinflammatory cytokines, including tumor necrosis factor α (TNF-α) and interleukin-12 (IL-12). Production of these cytokines leads to activation of “exhausted” CD8+ cytolytic T cells, which leads to clearance of the infection. Certain ASOs with unique sequences and chemical modifications were found to activate human TLR8 receptor or potentiate the activation of human TLR8 by small molecule agonist such as R848.

[0198] Recently, studies using ASOs to treat HBV discovered that the ASOs were able to trigger TLR8 activation, which presents an additional pathway to control and reduce HBV infection. As this link between ASOs and TLR8-activation has not been well studied, it is unknown how different sequences and modifications of the ASOs, including nucleoside modifications and phosphorothioate linkages, may impact the ability of the ASOs to activate this immune pathway, which improves treatment outcomes for HBV.

### Caspase Activity

[0199] As provided in the Examples included herein, the disclosed ASO may possess low amounts of caspase induction activity. Caspases are the major mediators of apoptosis; cells that have high levels of caspase expression or activation are undergoing cell death. Thus, ASOs that trigger less caspase expression or activation trigger less cell death.

### IV. Pharmaceutical Compositions

[0200] The present disclosure also encompasses pharmaceutical compositions comprising ASOs of the present disclosure. One embodiment is a pharmaceutical composition comprising one or more ASOs of the present disclosure, and a pharmaceutically acceptable diluent or carrier.

[0201] In some embodiments, the pharmaceutical compositions comprise any of the ASOs and nucleotide sequences described herein. The compositions may comprise 1, 2, 3, 4, 5, 6, 7, 8, 9, 10, 11, 12, or more ASOs described herein. The compositions may comprise a nucleotide sequence comprising a nucleotide sequence of any one of SEQ ID NOs: 3-320, 353-404, and 446-1344. In some embodiments, the pharmaceutical composition comprises any one of ASO-676 (SEQ ID NO: 697), ASO-677 (SEQ ID NO: 698), ASO-1037 (SEQ ID NO: 1058), ASO-707 (SEQ ID NO: 728), ASO-1192 (SEQ ID NO: 1213), ASO-651 (SEQ ID NO: 672), ASO-1166 (SEQ ID NO: 1187), ASO-1181 (SEQ ID NO: 1202), ASO-1179 (SEQ ID NO: 1200), and ASO-962 (SEQ ID NO: 983). In some embodiments, the ASO is selected from ASO-676 (SEQ ID NO: 697), ASO-677 (SEQ ID NO: 698), ASO-1037 (SEQ ID NO: 1058), ASO-707 (SEQ ID NO: 728), and ASO-1192 (SEQ ID NO: 1213). In some embodiments, the ASO is selected from ASO-651 (SEQ ID NO: 672), ASO-1166 (SEQ ID NO: 1187), ASO-1181 (SEQ ID NO: 1202), and ASO-1179 (SEQ ID NO: 1200). In some embodiments, the ASO is ASO-962 (SEQ ID NO: 983).

[0202] In some embodiments, the pharmaceutical composition containing the ASO of the present disclosure is formulated for systemic administration via parenteral delivery. Parenteral administration includes intravenous, intra-arterial, subcutaneous, intraperitoneal or intramuscular injection or infusion; also subdermal administration, e.g., via an implanted device. In a preferred embodiment, the pharmaceutical composition containing the ASO of the present disclosure is formulated for subcutaneous (SC) or intravenous (IV) delivery. Formulations for parenteral administration may include sterile aqueous solutions, which may also contain buffers, diluents and other pharmaceutically acceptable additives as understood by the skilled artisan. For intravenous use, the total concentration of solutes may be controlled to render the preparation isotonic.

[0203] The pharmaceutical composition containing the ASO of the present disclosure is useful for treating a disease or disorder, e.g., associated with the expression or activity of a hepatitis B virus gene, such as X gene or S gene.

[0204] In some embodiments, the pharmaceutical composition comprises an ASO of the present disclosure that is complementary or hybridizes to a viral target RNA sequence (e.g., HBV target gene), and a pharmaceutically acceptable diluent or carrier. When the pharmaceutical composition comprises two or more ASOs, the ASOs may be present in varying amounts. For example, in some embodiments, the weight ratio of first ASO to second ASO is 1:4 to 4:1, e.g., 1:4, 1:3, 1:2, 1:1, 2:1, 3:1, or 4:1. In some embodiments, the molar ratio of first ASO to second ASO is 1:4 to 4:1, e.g., 1:4, 1:3, 1:2, 1:1, 2:1, 3:1, or 4:1.

[0205] In some embodiments, the pharmaceutical composition comprises an amount of one or more of the ASOs described herein formulated with one or more pharmaceutically acceptable carriers (additives) and/or diluents. The pharmaceutical compositions may be specially formulated for administration in solid or liquid form, including those adapted for the following: (1) parenteral administration, for example, by subcutaneous, intramuscular, intravenous or epidural injection as, for example, a sterile solution or suspension, or sustained-release formulation; (2) topical application, for example, as a cream, ointment, or a controlled-release patch or spray applied to the skin; (3) intravaginally or intrarectally, for example, as a pessary, cream or foam; (4) sublingually; (5) ocularly; (6) transdermally; or (7) nasally.

[0206] Wetting agents, emulsifiers and lubricants, such as sodium lauryl sulfate and magnesium stearate, as well as coloring agents, release agents, coating agents, sweetening, flavoring and perfuming agents, preservatives and antioxidants can also be present in the compositions.

[0207] Examples of pharmaceutically-acceptable antioxidants include: (1) water soluble antioxidants, such as ascorbic acid, cysteine hydrochloride, sodium bisulfate, sodium metabisulfite, sodium sulfite and the like; (2) oil-soluble antioxidants, such as ascorbyl palmitate, butylated hydroxyanisole (BHA), butylated hydroxytoluene (BHT), lecithin, propyl gallate, alpha-tocopherol, and the like; and (3) metal chelating agents, such as citric acid, ethylenediamine tetraacetic acid (EDTA), sorbitol, tartaric acid, phosphoric acid, and the like.

[0208] Formulations of the present disclosure include those suitable for nasal, topical (including buccal and sublingual), rectal, vaginal and/or parenteral administration. The formulations may conveniently be presented in unit dosage form and may be prepared by any methods well known in the art of pharmacy. The amount of active ingredient which can be combined with a carrier material to produce a single dosage form will vary depending upon the host being treated, the particular mode of administration. The amount of active ingredient which can be combined with a carrier material to produce a single dosage form will generally be that amount of the compound (e.g., ASO) which produces a therapeutic effect. Generally, out of one hundred percent, this amount will range from about 0.1 percent to about ninety-nine percent of active ingredient, preferably from about 5 percent to about 70 percent, most preferably from about 10 percent to about 30 percent.

[0209] In some embodiments, a formulation of the present disclosure comprises an excipient selected from the group consisting of cyclodextrins, celluloses, liposomes, micelle forming agents, e.g., bile acids, and polymeric carriers, e.g., polyesters and polyanhydrides; and a compound (e.g., ASO) of the present disclosure.

[0210] Methods of preparing these formulations or compositions include the step of bringing into association a compound (e.g., ASO) of the present disclosure with the carrier and, optionally, one or more accessory ingredients. In general, the formulations are prepared by uniformly and intimately bringing into association a compound (e.g., ASO) of the present disclosure with liquid carriers, or finely divided solid carriers, or both, and then, if necessary, shaping the product.

[0211] Formulations of the disclosure suitable for a suspension in an aqueous or non-aqueous liquid, or as an oil-in-water or water-in-oil liquid emulsion, or as an elixir or syrup, each containing a predetermined amount of a compound (e.g., ASO) of the present disclosure as an active ingredient. A compound (e.g., ASO) of the present disclosure may also be administered as a bolus, electuary, or paste.

[0212] In dosage forms of the disclosure, the active ingredient may be mixed with one or more pharmaceutically-acceptable carriers, such as sodium citrate or dicalcium phosphate, and/or any of the following: (1) fillers or extenders, such as starches, lactose, sucrose, glucose, mannitol, and/or silicic acid; (2) binders, such as, for example, carboxymethylcellulose, alginates, gelatin, polyvinyl pyrrolidone, sucrose and/or acacia; (3) humectants, such as glycerol; (4) disintegrating agents, such as agar-agar, calcium carbonate, potato or tapioca starch, alginic acid, certain silicates, and sodium carbonate; (5) solution retarding agents, such as paraffin; (6) absorption accelerators, such as quaternary ammonium compounds and surfactants, such as poloxamer and sodium lauryl sulfate; (7) wetting agents, such as, for example, cetyl alcohol, glycerol monostearate, and non-ionic surfactants; (8) absorbents, such as kaolin and bentonite clay; (9) lubricants, such as talc, calcium stearate, magnesium stearate, solid polyethylene glycols, sodium lauryl sulfate, zinc stearate, sodium stearate, stearic acid, and mixtures thereof; (10) coloring agents; and (11) controlled release agents such as crospovidone or ethyl cellulose.

[0213] The disclosed dosage forms may be sterilized by, for example, filtration through a bacteria-retaining filter, or by incorporating sterilizing agents in the form of sterile solid compositions which can be dissolved in sterile water, or some other sterile injectable medium immediately before use. These compositions may also optionally contain opacifying agents and may be of a composition that they release the active ingredient(s) only, or preferentially, in a certain portion of the gastrointestinal tract, optionally, in a delayed manner. Examples of embedding compositions which can be used include polymeric substances and waxes. The active ingredient can also be in micro-encapsulated form, if appropriate, with one or more of the above-described excipients.

[0214] Liquid dosage forms of the compounds (e.g., ASO) of the disclosure include pharmaceutically acceptable emulsions, microemulsions, solutions, suspensions, syrups and elixirs. In addition to the active ingredient, the liquid dosage forms may contain inert diluents commonly used in the art, such as, for example, water or other solvents, solubilizing agents and emulsifiers, such as ethyl alcohol, isopropyl alcohol, ethyl carbonate, ethyl acetate, benzyl alcohol, benzyl benzoate, propylene glycol, 1,3-butylene glycol, oils (I particular, cottonseed, groundnut, corn, germ, olive, castor and sesame oils), glycerol, tetrahydrofuryl alcohol, polyethylene glycols and fatty acid esters of sorbitan, and mixtures thereof.

[0215] Besides inert diluents, the compositions can also include adjuvants such as wetting agents, emulsifying and suspending agents, sweetening, flavoring, coloring, perfuming and preservative agents.

[0216] Suspensions, in addition to the active compounds (e.g., ASO), may contain suspending agents as, for example, ethoxylated isostearyl alcohols, polyoxyethylene sorbitol and sorbitan esters, microcrystalline cellulose, aluminum metahydroxide, bentonite, agar-agar and tragacanth, and mixtures thereof.

[0217] Formulations of the pharmaceutical compositions of the disclosure for rectal or vaginal administration may be presented as a suppository, which may be prepared by mixing one or more compounds (e.g., ASO) of the disclosure with one or more suitable nonirritating excipients or carriers comprising, for example, cocoa butter, polyethylene glycol, a suppository wax or a salicylate, and which is solid at room temperature, but liquid at body temperature and, therefore, will melt in the rectum or vaginal cavity and release the active compound (e.g., ASO).

[0218] Formulations of the present disclosure which are suitable for vaginal administration also include pessaries, tampons, creams, gels, pastes, foams or spray formulations containing such carriers as are known in the art to be appropriate.

[0219] Dosage forms for the topical or transdermal administration of a compound (e.g., ASO) of this disclosure include powders, sprays, ointments, pastes, creams, lotions, gels, solutions, patches and inhalants. The active compound (e.g., ASO) may be mixed under sterile conditions with a pharmaceutically acceptable carrier, and with any preservatives, buffers, or propellants which may be required.

[0220] The ointments, pastes, creams and gels may contain, in addition to an active compound (e.g., ASO) of this disclosure, excipients, such as animal and vegetable fats, oils, waxes, paraffins, starch, tragacanth, cellulose derivatives, polyethylene glycols, silicones, bentonites, silicic acid, talc and zinc oxide, or mixtures thereof.

[0221] Powders and sprays can contain, in addition to a compound (e.g., ASO) of this disclosure, excipients such as lactose, talc, silicic acid, aluminum hydroxide, calcium silicates and polyamide powder, or mixtures of these substances. Sprays can additionally contain customary propellants, such as chlorofluorohydrocarbons and volatile unsubstituted hydrocarbons, such as butane and propane.

[0222] Transdermal patches have the added advantage of providing controlled delivery of a compound (e.g., ASO) of the present disclosure to the body. Such dosage forms can be made by dissolving or dispersing the compound (e.g., ASO) in the proper medium. Absorption enhancers can also be used to increase the flux of the compound (e.g., ASO) across the skin. The rate of such flux can be controlled by either providing a rate controlling membrane or dispersing the compound (e.g., ASO) in a polymer matrix or gel.

[0223] Ophthalmic formulations, eye ointments, powders, solutions and the like, are also contemplated as being within the scope of this disclosure.

[0224] Pharmaceutical compositions of this disclosure suitable for parenteral administration comprise one or more compounds (e.g., ASO) of the disclosure in combination with one or more pharmaceutically-acceptable sterile isotonic aqueous or nonaqueous solutions, dispersions, suspensions or emulsions, or sterile powders which may be reconstituted into sterile injectable solutions or dispersions just prior to use, which may contain sugars, alcohols, antioxidants, buffers, bacteriostats, solutes which render the formulation isotonic with the blood of the intended recipient or suspending or thickening agents.

[0225] Examples of suitable aqueous and nonaqueous carriers which may be employed in the pharmaceutical compositions of the disclosure include water, ethanol, polyols (such as glycerol, propylene glycol, polyethylene glycol, and the like), and suitable mixtures thereof, vegetable oils, such as olive oil, and injectable organic esters, such as ethyl oleate. Proper fluidity can be maintained, for example, by the use of coating materials, such as lecithin, by the maintenance of the required particle size in the case of dispersions, and by the use of surfactants.

[0226] These compositions may also contain adjuvants such as preservatives, wetting agents, emulsifying agents and dispersing agents. Prevention of the action of microorganisms upon the subject compounds may be ensured by the inclusion of various antibacterial and antifungal agents, for example, paraben, chlorobutanol, phenol sorbic acid, and the like. It may also be desirable to include isotonic agents, such as sugars, sodium chloride, and the like into the compositions. In addition, prolonged absorption of the injectable pharmaceutical form may be brought about by the inclusion of agents which delay absorption such as aluminum monostearate and gelatin.

[0227] In some cases, in order to prolong the effect of a drug, it is desirable to slow the absorption of the drug from subcutaneous or intramuscular injection. This may be accomplished by the use of a liquid suspension of crystalline or amorphous material having poor water solubility. The rate of absorption of the drug then depends upon its rate of dissolution which, in turn, may depend upon crystal size and crystalline form. Alternatively, delayed absorption of a parenterally-administered drug form is accomplished by dissolving or suspending the drug in an oil vehicle.

[0228] Injectable depot forms are made by forming microencapsule matrices of the subject compounds (e.g., ASO) in biodegradable polymers such as polylactide-polyglycolide. Depending on the ratio of drug to polymer, and the nature of the particular polymer employed, the rate of drug release can be controlled. Examples of other biodegradable polymers include poly(orthoesters) and poly(anhydrides). Depot injectable formulations are also prepared by entrapping the drug in liposomes or microemulsions which are compatible with body tissue.

[0229] When the compounds (e.g., ASO) of the present disclosure are administered as pharmaceuticals, to humans and animals, they can be given per se or as a pharmaceutical composition containing, for example, 0.1 to 99% (more preferably, 10 to 30%) of active ingredient in combination with a pharmaceutically acceptable carrier.

### V. Treatments

[0230] Disclosed herein are methods of treatment or prevention of a disease or disorder in a subject in need thereof using the ASOs described above. Further disclosed herein are methods of treating an infection (e.g., HBV infection) in a subject in need thereof, the method comprising administering to the subject any of the ASOs described herein. Further disclosed herein are uses of any of the ASOs described herein in the manufacture of a medicament for treating an infection (e.g., HBV infection).

[0231] In some embodiments, a method of treating or preventing a disease in a subject in need thereof comprises administering to the subject any of the ASOs disclosed herein. In some embodiments, a method of treating or preventing a disease in a subject in need thereof comprises administering to the subject any of the compositions disclosed herein.

[0232] In some embodiments, the subject is a mammal. In some embodiments, the subject is a human. In some embodiments, the subject is a non-human primate. In some embodiments, the subject is a cat. In some embodiments, the subject is a camel. In preferred embodiments in which the subject is a human, the subject may be at least 40 years old, at least 45 years old, at least 50 years old, at least 55 years old, at least 60 years old, at least 65 years old, at least 70 years old, at least 75 years old, or at least 80 years old or older. In some embodiments, the subject is a pediatric subject (i.e., less than 18 years old).

[0233] The preparations (e.g., ASOs or pharmaceutical compositions thereof) of the present disclosure may be given parenterally, topically, or rectally or administered in the form of an inhalant. They are, of course, given in forms suitable for each administration route. For example, they are administered in tablets or capsule form, administration by injection, infusion, or inhalation; topical by lotion or ointment; rectal by suppositories. Injection, infusion, or inhalation are preferred.

[0234] These compounds may be administered to humans and other animals for therapy or as a prophylactic by any suitable route of administration, including nasally (as by, for example, a spray), rectally, intravaginally, parenterally, intracisternally and topically, as by powders, ointments or drops, including buccally and sublingually. In some embodiments, the compounds or compositions are inhaled, as by, for example, an inhaler, a nebulizer, or in an aerosolized form.

[0235] Regardless of the route of administration selected, the compounds (e.g., ASOs) of the present disclosure, which may be used in a suitable hydrated form, and/or the pharmaceutical compositions of the present disclosure, are formulated into pharmaceutically-acceptable dosage forms by conventional methods known to those of skill in the art.

[0236] In some embodiments, the present disclosure provides method of treating a hepatitis B virus (HBV) infection, comprising administering to a subject in need thereof a therapeutically effective amount of one or more of the ASOs or a pharmaceutical composition as disclosed herein. In some embodiments, the subject has been treated with one or more additional HBV treatment agents. In some embodiments, the subject is concurrently treated with one or more additional HBV treatment agents.

[0237] Actual dosage levels of the active ingredients (e.g., ASO) in the pharmaceutical compositions of this disclosure may be varied so as to obtain an amount of the active ingredient which is effective to achieve the desired therapeutic response for a particular patient, composition, and mode of administration, without being toxic to the patient.

[0238] The selected dosage level will depend upon a variety of factors including the activity of the particular compound (e.g., ASO) of the present disclosure employed, or the ester, salt or amide thereof, the route of administration, the time of administration, the rate of excretion or metabolism of the particular compound being employed, the rate and extent of absorption, the duration of the treatment, other drugs, compounds and/or materials used in combination with the particular compound employed, the age, sex, weight, condition, general health and prior medical history of the patient being treated, and like factors well known in the medical arts.

[0239] A physician or veterinarian having ordinary skill in the art can readily determine and prescribe the effective amount of the pharmaceutical composition required. For example, the physician or veterinarian could start doses of the compounds (e.g., ASO) of the disclosure employed in the pharmaceutical composition at levels lower than that required in order to achieve the desired therapeutic effect and gradually increase the dosage until the desired effect is achieved.

[0240] In general, a suitable daily dose of a compound (e.g., ASO) of the disclosure is the amount of the compound that is the lowest dose effective to produce a therapeutic effect. Such an effective dose generally depends upon the factors described above. Preferably, the compounds are administered at about 0.01 mg/kg to about 200 mg/kg, more preferably at about 0.1 mg/kg to about 100 mg/kg, even more preferably at about 0.5 mg/kg to about 50 mg/kg. In some embodiments, the compound is administered at a dose equal to or greater than 0.01, 0.02, 0.03, 0.04, 0.05, 0.06, 0.07, 0.08, 0.09, 0.10, 0.11, 0.12, 0.13, 0.14, 0.15, 0.16, 0.17, 0.18, 0.19, 0.20, 0.21, 0.22, 0.23, 0.24, 0.25, 0.26, 0.27, 0.28, 0.29, 0.30, 0.35, 0.40, 0.45, 0.50, 0.55, 0.60, 0.65, 0.7, 0.75, 0.8, 0.85, 0.9, 0.95, or 1 mg/kg. In some embodiments, the compound is administered at a dose equal to or less than 200, 190, 180, 170, 160, 150, 140, 130, 120, 110, 100, 95, 90, 85, 80, 75, 70, 65, 60, 55, 50, 45, 40, 35, 30, 25, 20, or 15 mg/kg. In some embodiments, the total daily dose of the compound is equal to or greater than 10, 15, 20, 25, 30, 35, 40, 45, 50, 55, 60, 65, 70, 75, 80, 85, 90, 95, 100, 105, 110, 115, 120, 125, 130, 135, 140, 145, 150, 155, 160, 165, 170, 175, 180, 185, 190, 195, 200, 205, 210, 215, 220, 225, 230, 235, 240, 245, 250, 255, 260, 265, 270, 275, 280, 285, 290, 295, 300, 305, 310, 315, 320, 325, 330, 335, 340, 345, 350, 355, 360, 365, 370, 375, 380, 385, 390, 395, or 400 mg.

[0241] If desired, the effective daily dose of the active compound (e.g., ASO) may be administered as two, three, four, five, six, seven, eight, nine, ten or more doses or sub-doses administered separately at appropriate intervals throughout the day, optionally, in unit dosage forms. In some embodiments, the compound is administered at least 1, 2, 3, 4, 5, 6, 7, 8, 9, 10, 11, 12, 13, 14, or 15 times. Preferred dosing is one administration per day. In some embodiments, the compound is administered at least 1, 2, 3, 4, 5, 6, 7, 8, 9, 10, 11, 12, 13, 14, 15, 16, 17, 18, 19, 20, or 21 times a week. In some embodiments, the compound is administered at least 1, 2, 3, 4, 5, 6, 7, 8, 9, 10, 11, 12, 13, 14, 15, 16, 17, 18, 19, 20, or 21 times a month. In some embodiments, the compound is administered once every 1, 2, 3, 4, 5, 6, 7, 8, 9, 10, 11, 12, 13, 14, 15, 16, 17, 18, 19, 20, or 21 days. In some embodiments, the compound is administered every 3 days. In some embodiments, the compound is administered once every 1, 2, 3, 4, 5, 6, 7, 8, 9, 10, 11, 12, 13, 14, or 15 weeks. In some embodiments, the compound is administered every month. In some embodiments, the compound is administered once every 1, 2, 3, 4, 5, 6, 7, 8, 9, 10, 11, 12, 13, 14, or 15 months. In some embodiments, the compound is administered at least 1, 2, 3, 4, 5, 6, 7, 8, 9, 10, 11, 12, 13, 14, 15, 16, 17, 18, 19, 20, 21, 22, 23, 24, 25, 26, 27, 28, 29, 30, 31, 32, 33, 34, 35, 36, 37, 38, 39, 40, 41, 42, 43, 44, 45, 46, 47, 48, 49, 50, 51, 52, or 53 times over a period of at least 1, 2, 3, 4, 5, 6, 7, 8, 9, 10, 11, 12, 13, 14, 15, 16, 17, 18, 19, 20, 21, 22, 23, 24, 25, 26, 27, 28, 29, 30, 31, 32, 33, 34, 35, 36, 37, 38, 39, 40, 41, 42, 43, 44, 45, 46, 47, 48, 49, 50, 51, 52, 53, 54, 55, 56, 57, 58, 59, 60, 61, 62, 63, 64, 65, 66, 67, 68, 69, or 70 days. In some embodiments, the compound is administered at least 1, 2, 3, 4, 5, 6, 7, 8, 9, 10, 11, 12, 13, 14, 15, 16, 17, 18, 19, 20, 21, 22, 23, 24, 25, 26, 27, 28, 29, 30, 31, 32, 33, 34, 35, 36, 37, 38, 39, 40, 41, 42, 43, 44, 45, 46, 47, 48, 49, 50, 51, 52, or 53 times over a period of at least 1, 2, 3, 4, 5, 6, 7, 8, 9, 10, 11, 12, 13, 14, 15, 16, 17, 18, 19, 20, 21, 22, 23, 24, 25, 26, 27, 28, 29, 30, 31, 32, 33, 34, 35, 36, 37, 38, 39, 40, 41, 42, 43, 44, 45, 46, 47, 48, 49, 50, 51, 52, or 53 weeks. In some embodiments, the compound is administered at least 1, 2, 3, 4, 5, 6, 7, 8, 9, 10, 11, 12, 13, 14, 15, 16, 17, 18, 19, 20, 21, 22, 23, 24, 25, 26, 27, 28, 29, 30, 31, 32, 33, 34, 35, 36, 37, 38, 39, 40, 41, 42, 43, 44, 45, 46, 47, 48, 49, 50, 51, 52, or 53 times over a period of at least 1, 2, 3, 4, 5, 6, 7, 8, 9, 10, 11, 12, 13, 14, 15, 16, 17, 18, 19, 20, 21, 22, 23, 24, 25, 26, 27, 28, 29, 30, 31, 32, 33, 34, 35, 36, 37, 38, 39, 40, 41, 42, 43, 44, 45, 46, 47, 48, 49, 50, 51, 52, or 53 months. In some embodiments, the compound is administered at least once a week for a period of at least 1, 2, 3, 4, 5, 6, 7, 8, 9, 10, 11, 12, 13, 14, 15, 16, 17, 18, 19, 20, 21, 22, 23, 24, 25, 26, 27, 28, 29, 30, 31, 32, 33, 34, 35, 36, 37, 38, 39, 40, 41, 42, 43, 44, 45, 46, 47, 48, 49, 50, 51, 52, 53, 54, 55, 56, 57, 58, 59, 60, 61, 62, 63, 64, 65, 66, 67, 68, 69, or 70 weeks. In some embodiments, the compound is administered at least once a week for a period of at least 1, 2, 3, 4, 5, 6, 7, 8, 9, 10, 11, 12, 13, 14, 15, 16, 17, 18, 19, 20, 21, 22, 23, 24, 25, 26, 27, 28, 29, 30, 31, 32, 33, 34, 35, 36, 37, 38, 39, 40, 41, 42, 43, 44, 45, 46, 47, 48, 49, 50, 51, 52, 53, 54, 55, 56, 57, 58, 59, 60, 61, 62, 63, 64, 65, 66, 67, 68, 69, or 70 months. In some embodiments, the compound is administered at least twice a week for a period of at least 1, 2, 3, 4, 5, 6, 7, 8, 9, 10, 11, 12, 13, 14, 15, 16, 17, 18, 19, 20, 21, 22, 23, 24, 25, 26, 27, 28, 29, 30, 31, 32, 33, 34, 35, 36, 37, 38, 39, 40, 41, 42, 43, 44, 45, 46, 47, 48, 49, 50, 51, 52, 53, 54, 55, 56, 57, 58, 59, 60, 61, 62, 63, 64, 65, 66, 67, 68, 69, or 70 weeks. In some embodiments, the compound is administered at least twice a week for a period of at least 1, 2, 3, 4, 5, 6, 7, 8, 9, 10, 11, 12, 13, 14, 15, 16, 17, 18, 19, 20, 21, 22, 23, 24, 25, 26, 27, 28, 29, 30, 31, 32, 33, 34, 35, 36, 37, 38, 39, 40, 41, 42, 43, 44, 45, 46, 47, 48, 49, 50, 51, 52, 53, 54, 55, 56, 57, 58, 59, 60, 61, 62, 63, 64, 65, 66, 67, 68, 69, or 70 months. In some embodiments, the compound is administered at least once every two weeks for a period of at least 2, 3, 4, 5, 6, 7, 8, 9, 10, 11, 12, 13, 14, 15, 16, 17, 18, 19, 20, 21, 22, 23, 24, 25, 26, 27, 28, 29, 30, 31, 32, 33, 34, 35, 36, 37, 38, 39, 40, 41, 42, 43, 44, 45, 46, 47, 48, 49, 50, 51, 52, 53, 54, 55, 56, 57, 58, 59, 60, 61, 62, 63, 64, 65, 66, 67, 68, 69, or 70 weeks. In some embodiments, the compound is administered at least once every two weeks for a period of at least 2, 3, 4, 5, 6, 7, 8, 9, 10, 11, 12, 13, 14, 15, 16, 17, 18, 19, 20, 21, 22, 23, 24, 25, 26, 27, 28, 29, 30, 31, 32, 33, 34, 35, 36, 37, 38, 39, 40, 41, 42, 43, 44, 45, 46, 47, 48, 49, 50, 51, 52, 53, 54, 55, 56, 57, 58, 59, 60, 61, 62, 63, 64, 65, 66, 67, 68, 69, or 70 months. In some embodiments, the compound is administered at least once every four weeks for a period of at least 4, 5, 6, 7, 8, 9, 10, 11, 12, 13, 14, 15, 16, 17, 18, 19, 20, 21, 22, 23, 24, 25, 26, 27, 28, 29, 30, 31, 32, 33, 34, 35, 36, 37, 38, 39, 40, 41, 42, 43, 44, 45, 46, 47, 48, 49, 50, 51, 52, 53, 54, 55, 56, 57, 58, 59, 60, 61, 62, 63, 64, 65, 66, 67, 68, 69, or 70 weeks. In some embodiments, the compound is administered at least once every four weeks for a period of at least 4, 5, 6, 7, 8, 9, 10, 11, 12, 13, 14, 15, 16, 17, 18, 19, 20, 21, 22, 23, 24, 25, 26, 27, 28, 29, 30, 31, 32, 33, 34, 35, 36, 37, 38, 39, 40, 41, 42, 43, 44, 45, 46, 47, 48, 49, 50, 51, 52, 53, 54, 55, 56, 57, 58, 59, 60, 61, 62, 63, 64, 65, 66, 67, 68, 69, or 70 months.

[0242] In some embodiments, any one of the ASOs or compositions disclosed herein is administered in a particle or viral vector. In some embodiments, the viral vector is a vector of adenovirus, adeno-associated virus (AAV), alphavirus, flavivirus, herpes simplex virus, lentivirus, measles virus, picornavirus, poxvirus, retrovirus, or rhabdovirus. In some embodiments, the viral vector is a recombinant viral vector. In some embodiments, the viral vector is selected from AAVrh.74, AAVrh. 10, AAVrh.20, AAV-1, AAV-2, AAV-3, AAV-4, AAV-5, AAV-6, AAV-7, AAV-8, AAV-9, AAV-10, AAV-11, AAV-12 and AAV-13.

[0243] The subject of the described methods may be a mammal, and it includes humans and non-human mammals. In some embodiments, the subject is a human, such as an adult human.

[0244] The disclosed ASO can be administered alone or in combination with one or more additional HBV treatment agents and/or antiviral agents. The additional HBV treatment agents and/or antiviral agents may be a small molecule (e.g., a nucleoside analog or a protease inhibitor) or a biologic (e.g., an antibody or peptide). Examples of suitable HBV treatment agents include, but are not limited to, a nucleotide analog, nucleoside analog, a capsid assembly modulator (CAM), a recombinant interferon, an entry inhibitor, a small molecule immunomodulator, and an oligonucleotide therapy. In some embodiments, the additional HBV treatment agent is selected from HBV STOPS™, HBV CAM ALG-000184, ALG-125755, recombinant interferon alpha 2b, IFN-α, PEG-IFN-α-2a, PEG-INF-2b, Pegbing (Mipeginterferon alfa-2b), lamivudine, telbivudine, adefovir dipivoxil, clevudine, entecavir, tenofovir alafenamide, tenofovir disoproxil, JNJ-3989 (ARO-HBV, or GSK5637608), GSK3228836, REP-2139, REP-2165, VIR-2218 (BRII-835, or Elebsiran), AB-729 (Imdurisan), DCR-HBVS (RG6346 or Xalnesiran), BW-20507 (Argo HBV siRNA), HT-101 (Hepa Thera HBV siRNA), OLX703A (Olix HBV siRNA), HRS-5635 (Hengrui HBV siRNA), RBD1016 (Ribo HBV siRNA), TQA3038 (ChiaTai Tianqing HBV siRNA), GLS4, NZ-4, RG7907, EDP-514, ABI-H03733, ABI-H2158, ZM-H1505R, ABI-4334 (CAMs), and ABI-6250 (HDV entry inhibitor). In some embodiments, the oligonucleotide therapy is selected from Nucleic Acid Polymers or S-Antigen Transport-inhibiting Oligonucleotide Polymers (NAPs or STOPS), siRNA, and ASO. In some embodiments, any of the ASOs disclosed herein are co-administered with STOPS. Exemplary STOPS are described in International Publication No. WO2020/097342 and U.S. Publication No. 2020/0147124, both of which are incorporated by reference in their entirety. In some embodiments, the STOPS is ALG-010133. In some embodiments, any of the ASOs disclosed herein are co-administered with tenofovir. In some embodiments, any of the ASOs disclosed herein are co-administered with a CAM. Exemplary CAMs are described in Berke et al., Antimicrob Agents Chemother, 2017, 61 (8): e00560-17, Klumpp, et al., Gastroenterology, 2018, 154 (3): 652-662.e8, International Application Nos. PCT/US2020/017974, PCT/US2020/026116, and PCT/US2020/028349 and U.S. application Ser. Nos. 16/789,298, 16/837,515, and 16/849,851, each which is incorporated by reference in its entirety. In some embodiments, the CAM is ALG-000184, ALG-001075, ALG-001024, JNJ-632, BAY41-4109, ABI-4334, or NVR3-778. In some embodiments, the ASOs and the HBV treatment agent are administered simultaneously. In some embodiments, the ASOs and the HBV treatment agent are administered concurrently. In some embodiments, the ASOs and the HBV treatment agent are administered sequentially. In some embodiments, the ASOs are administered prior to administering the HBV treatment agent. In some embodiments, the ASOs are administered after administering the HBV treatment agent. In some embodiments, the ASOs and the HBV treatment agent are in separate containers. In some embodiments, the ASOs and the HBV treatment agent are in the same container.

[0245] When the compounds (e.g., ASOs) described herein are co-administered with another, the effective amount may be less when the compound is used alone.

### EXAMPLES

[0246] The present technology is further illustrated by the following Examples, which should not be construed as limiting in any way.

### Example 1: ASO Synthesis

[0247] Gapmer ASO Sequences: The DNA, 2′-O-Me, and LNA phosphoramidite monomers were procured from commercially available sources (Hongene Biotech USA Inc.). All the monomers were dried in vacuum desiccator with desiccants (P₂O₅, RT 24h). Universal solid supports (CPG) attached were obtained from ChemGenes corporation. The chemicals and solvents for synthesis workflow were purchased from VWR/Sigma commercially available sources and used without any purification or treatment. Solvent (acetonitrile) and solutions (amidite and activator) were stored over molecular sieves during synthesis.

[0248] The control and target oligonucleotide sequences were synthesized on an Expedite 8909 synthesizer using the standard cycle written by the manufacturer with modifications to a few wait steps and modified coupling steps. The solid support was controlled pore glass and the monomers contained standard protecting groups. Each chimeric oligonucleotide was individually synthesized using commercially available 5′-O-(4,4′-dimethoxytrityl)-3′-O-(2-cyanoethyl-N,N-diisopropyl) DNA, 2′-OMe, and or LNA phosphoramidite monomers of 6-N-benzoyladenosine (A^{Bz}), 4-N-acetylcytidine (C^{Bz}), 2-N-isobutyrylguanosine (G^{iBu}), and Uridine (U) or Thymidine (T), according to standard solid phase Phosphoramidite synthesis protocols. The 2′-O-Me-2,6-diaminopurine phosphoramidite was purchased from Glen Research. The phosphoramidites were prepared as 0.1 M solutions in anhydrous acetonitrile. 5-Ethylthiotetrazole was used as activator, 3% dichloroacetic acid in dichloromethane was used to detritylate, acetic anhydride in THF and 16% N-methylimidazole in THF were used to cap, and DDTT ((dimethylamino-methylidene) amino)-3H-1,2,4-dithiazaoline-3-thione was used as the sulfur-transfer agent for the synthesis of oligoribonucleotide phosphorothioates. An extended coupling of 0.1M solution of phosphoramidite in CH₃CN in the presence of 5-(ethylthio)-1H-tetrazole activator to a solid bound oligonucleotide followed by extended capping, oxidation and deprotection afforded modified oligonucleotides. The stepwise coupling efficiency of all modified phosphoramidites was more than 98.5%.

[0249] Deprotection and cleavage from the solid support was achieved with mixture of ammonia methylamine (1:1, AMA) for 15 min at 65° C., when the universal linker was used, the deprotection was left for 90 min at 65° C. or solid supports were heated with aqueous ammonia (28%) solution at 55° C. for 8 h to deprotect the base labile protecting groups.

[0250] After filtering to remove the solid support, the deprotection solution was removed under vacuum in a GeneVac centrifugal evaporator.

### Example 2: Generation of Initial Parental ASOs

[0251] In order to identify additional antisense oligonucleotides (ASOs), a known control ASO that reduces expression of hepatitis B virus (HBV) genes was selected as a starting point for the development of parental ASOs. The parental ASOs, ASO-2 through ASO-9 and ASO-318 and ASO-319, were generated by targeting the HBV X Protein transcript region. Table 1 discloses the modified sequences of the control ASO (ASO-1) and the ten parental ASOs, and Table 2 shows the unmodified sequences.

[0252] To test the efficacy of the ASO to activate RNase H-mediated degradation of the target HBV RNA, the ten parental ASOs were compared to the control ASO in the assay disclosed above to measure EC₅₀ values. The EC₅₀ assay measures the concentration of ASO necessary to reduce the transcript levels 50% in relation to an untreated cell control; thus, a reduction in the EC₅₀ value indicates an increased activation capacity for the ASO. As the EC₅₀ assay is not very sensitive, any changes less than two- to three-fold different from the control ASO is considered similar to the RNAse H activation seen utilizing the control ASO-1. To test the potential of the ASOs to trigger cell death, the ten parental ASOs were compared to the control ASO in the assay disclosed above to measure CC₅₀ values. The CC₅₀ assay measures the concentration of the ASO necessary to reduce the cell population 50%; thus, an increased CC₅₀ value represents a decreased cytotoxicity of the ASO.

[0253] To test the efficacy of the disclosed ASOs to activate RNase H-mediated degradation activity, HepG2.2.15 cells with integrated HBV genome were maintained in DMEM/F-12 medium with 10% fetal bovine serum (FBS) and 1% penicillin/streptomycin, 1% glutamine, 1% non-essential amino acids, and 1% sodium pyruvate. Cells were maintained at 37° C. in a 5% CO₂ atmosphere. On the day of testing, cells were seeded at a concentration of 45,000 cells per well in collagen-I coated 96-well plates. After four hours of incubation, ASOs were transfected using Lipofectamine® RNAiMAX (Thermo Fisher, Cat #: 13778-150) following the manufacturer's instructions. On day 5 after treatment, supernatants were harvested for secreted HBsAg ELISA (Autobio, Cat #CL0310) measurement, and remaining adhered cells were assayed for viability with CellTiter-Glo (Promega, Cat #G7570).

[0254] As shown in Table 3, the RNase H activity of the HBV targeting ASO was expressed as EC₅₀. While several parental ASOs, including ASO-2, ASO-3, ASO-318, ASO-5, ASO-6, ASO-8 and ASO-9, exhibited a reduction in EC₅₀ value, and thus are potentially able to activate RNAse H-mediated degradation, the decrease is not necessarily a dramatic difference from the control ASO (Table 3, Column 2). As shown in Table 3, the cytotoxicity of the HBV targeting ASOs was expressed by CC₅₀. In this case, all parental ASOs displayed equal or greater CC₅₀ values, indicating that the ASOs trigger similar or reduced levels of cytotoxicity (Table 3, Column 3).

[0255] It was shown that the control ASO-1 was able to activate the TLR8 pathway, which is associated with the control and reduction of HBV infection in cells. In order to determine if any parental ASOs have similar or increased activation of TLR8, the control ASO and parental ASOs were subjected to the TLR8 assay described below. The values for the parental ASOs were normalized to the level of TLR8 activation of the control ASO. Parental ASOs ASO-2, ASO-3, ASO-4, ASO-318, ASO-5, ASO-7, and ASO-319 exhibited decreased activation of TLR8, while ASO-6, ASO-8, and ASO-9 exhibited increased activation of the same pathway (Table 3, Column 4).

[0256] To test the efficacy of the disclosed ASOs to activate the TLR8 pathway, HEK Blue hTLR8 (Invivogen; hkb-htlr8) were maintained in Dulbecco's Modification of Eagle's Medium (DMEM, Corning; 10 092 CM). The media was further supplemented with 10% fetal bovine serum (FBS, Corning; 35-011-CV), 100 μg/mL penicillin and 100 μg/mL streptomycin (Corning; 30-002-Cl), 100 μg/mL Normocin (Invivogen; ant-nr-05), 30 μg/mL Blasticidin (Invivogen; ant-b1-05), 100 μg/mL Zeocin (Invivogen; ant-zn-05), and 2 mM L-alanine L-glutamine (Glutagro, Corning; 25-015-Cl).

[0257] The small molecule control for hTLR8 assay was GS-9688, Selgantolimod; MedChem Express HY-109137, which is a known small molecule human TLR8 agonist. The oligo control for hTLR8 assay is poly U (Invivogen; tlrl-sspu). The competitive ASO control was ASO-1.

[0258] On the day of testing, LyoVec Transfection reagent (Invivogen; lyec-1) was prepared according to the manufacturer's protocol. In a 96-wel plate (Corning; 3997), 8 μL of prepared LyoVec was plated then 2 μL of each diluted ASO was added to the LyoVec solution in duplicate. HEK Blue hTLR8 cells were then added at the cell density of 80,000 cells per well in 190 μL of the assay media. The plates were then incubated at 37° C. and 5% CO₂ for 48 hours. At 48 hours post-transfection, 20 μL of the supernatant was harvested for secreted alkaline phosphatase assay (SEAP) using QUANTI-Blue Solution (Invivogen; rep-qbs) following the manufacturer's protocol. Optical density of the plates was read using a Perkin Elmer Envision instrument.

[0259] HEK Blue hTLR3 cells were obtained from Invivogen (Cat #hkb-htlr3). The assay protocol is the same as the protocol used for the HEK Blue hTLR8, except the assay control was Poly(A: U) (Invivogen; tlrl-pau).

[0260] HEK Blue hTLR4 (Invivogen; hkb-htlr4) were maintained in DMEM. The media was further supplemented with 10% FBS, 100 μg/mL penicillin and 100 μg/mL streptomycin, 100 μg/mL Normocin, 1×HEK Blue Selection (Invivogen; hb-sel), and 2 mM L-alanine L-glutamine. The assay protocol is the same as the protocol used for the HEK Blue hTLR8, except the assay control was purified lipopolysaccharide (LPS, Invivogen; tlrl-3pelps).

[0261] HEK Blue hTLR7 cells (Invivogen; hkb-htlr7) were maintained in DMEM. The media was further supplemented with 10% FBS, 100 μg/mL penicillin and 100 μg/mL streptomycin, 100 μg/mL Normocin, 30 μg/mL Blasticidin, 100 μg/mL Zeocin, and 2 mM L-alanine L-glutamine. The assay protocol is the same as the protocol used for the HEK Blue hTLR8, except the assay control was R848 (Resiquimod, Invivogen; tlrl-r848).

[0262] HEK Blue hTLR9 cells (Invivogen; hkb-htlr9) were maintained in the same growth media as that for HEK Blue hTLR7 cells. The assay protocol is the same as the protocol used for the HEK Blue hTLR8, except the assay control was ODN 2006 (ODN 7909, Invivogen; tlrl-2006). The effect of the disclosed ASOs on activating the various TLR pathways is shown in Table 3.

[0263] Activation of other TLR pathways, including TLR3, TLR4, TLR7, and TLR9 have been associated with immune response and inflammation, which on one hand might help combat infection, on the other hand may lead to increased negative side effects in the subject. To determine whether the control and parental ASOs activated TLR pathways other than hTLR8, the ASOs were subjected to the TLR3, TLR4, TLR7, and TLR9 activation assays as described above. ASO-1 activates human TLR8 more robustly than oligonucleotide positive control polyU; however, it did not activate human TLR3, TLR4, TLR7 and TLR9. ASO-6 activates human TLR8 more robustly than ASO-1. ASO-6 activates hTLR9 modestly but did not activate human TLR3, TLR4 and TLR7. ASOs ASO-2, ASO-3 and ASO-4 did not appear to activate any of the human TLRs in FIGS. 1A-1E. In summary, none of the ASOs activated the other TLR pathways as much as the positive activation control for each assay, except that ASO-6 modestly upregulated hTLR9. These data demonstrated that the control ASO-1 is a specific hTLR8 agonist, while ASO-6 is a stronger hTLR8 agonist than ASO-1 which also showed modest TLR9 agonist activity. The other ASOs tested showed no agonist activity in either hTLR3, hTLR4, hTLR7, hTLR8 or hTLR9 (FIGS. 1A-1E).

[0264] Finally, in order to determine whether the ASOs activate cell death mechanisms when transfected into cells, the ASOs were subjected to the caspase assay described below. The in vitro caspase 3/7 levels in multiple cell lines have been linked to necrosis in mouse livers in ASO toxicology studies. Lower caspase levels correlated with lower liver toxicity. The control and parental ASOs were transfected into cells at a concentration of 167 nM and 56 nM. The values of the parental ASOs were normalized to the level of caspase activity detected with the control ASO-1 sample. It was found that several parental ASOs, including ASO-4, ASO-318, ASO-6, and ASO-9, exhibited reduced levels of caspase activation as compared to the control ASO (Table 3, Column 5).

[0265] HepG2 cells were maintained in RPMI1640 medium with 10% fetal bovine serum (FBS) and 1% penicillin and 1% streptomycin. Cells were maintained at 37° C. in a 5% CO₂ atmosphere. The day before dosing, cells were seeded at a density that would reach 60% to 70% confluency in 24 hours. On the following day, ASOs were transfected at a concentration of 167 nM using Lipodectamine® RNAiMAX (Thermo Fisher, Cat #13778-150) following the manufacturer's instructions. The cells were incubated for 72 hours and then assayed for caspase induction using Promega's Caspase-Glo™ 3/7 Assay Kit (Cat #G8093) following manufacturer's instructions. The effect of the disclosed ASOs at a concentration 167 nM on activating caspases is shown in Table 3. For certain chemical modifications that are prone to increase liver toxicity, additional concentration of 56 nM was included in the caspase assay and analysis.

[0266] These assays indicate that the parental ASOs generated using the control ASO as a starting point for ASO development exhibit similar or enhanced activity as compared to the control ASO in several functional assays.

### Example 3: Generation of Secondary Modified ASOs

[0267] In order to generate additional ASOs, the ASO-6 parental ASO, which has higher hTLR8 activity and lower caspase activity than control ASO-1, was selected as the starting sequence for additional modifications. A series of modification types were selected for testing. The modifications include 2′ substituted nucleosides, including, but not limited to, 2′-MOE, 2′-O-cyp, 2′-O-mcyp, and 2′-OMe; 3′ substituted nucleosides, including, but not limited to 3′-xylo; 2′ and 3′ substituted nucleosides, including, but not limited to, 2′-OMe-3′-xylo; locked nucleosides, including, but not limited to, LNA, ScpBNA, AmNA, and GuNA; modified nucleobases, including, but not limited to, (8nh)G, (8nh)A, (2s)T, and (5oh)C; modified linkages, including phosphorothioate linkages and stereo-defined phosphorothioate linkages; and a combination of these various modifications. These modifications may increase the stability of the ASO while also increasing the ASO's abilities to reduce HBV infection. These modified nucleotides may be made via the methods described below or by standard methods known in the art.

[0268] The various modifications were introduced singly or in combination with other modifications to the ASOs and then subjected to the assays described above to determine RNAse H-mediated degradation, cytotoxicity, TLR8 pathway activation, and caspase activation (Table 4). A representative number of the test results of the various ASOs are shown in Table 3.

[0269] It was observed that modified ASOs with two or more LNAs exhibited increased caspase activation as compared to control ASOs lacking such modifications at 56 nM. In order to test whether the secondary modified ASOs activated caspases at this lower concentration, the caspase assay described above was repeated using a transfection concentration of 56 nM. A representative number of the caspase activity test results of the secondary modified ASOs at the lower concentration are shown in Table 4.

### Example 1 and 2 Results

TABLE 3
Assay Results for Tested ASOs

| | | | | Caspase |
|---|---|---|---|---|
| | | | hTLR8 Fold | Activity Fold |
| | | | Change vs. | Change vs. |
| ASO ID NO | EC₅₀ (nM) | CC₅₀ (nM) | Control | Control |
| ASO-1 | 8.6 | >167 | 1 | 1 |
| ASO-2 | 5.7 | >500 | 0.67 | 0.97 |
| ASO-3 | 5.8 | >500 | 0.48 | 1.1 |
| ASO-4 | 9.7 | >500 | 0.58 | 0.49 |
| ASO-318 | 5.9 | >500 | 0.56 | 0.90 |
| ASO-5 | 5.6 | >500 | 0.70 | 0.91 |
| ASO-6 | 5.8 | >167 | 1.5 | 0.86 |
| ASO-7 | 26 | >500 | 0.92 | 1.3 |
| ASO-319 | 8.0 | >500 | 0.82 | 1.5 |
| ASO-8 | 6.4 | >500 | 1.3 | 1.4 |
| ASO-9 | 5.6 | >500 | 1.4 | 0.93 |
| ASO-10 | 46.24 | >500 | 0.96 | N/A |
| ASO-11 | 54.80 | >500 | 0.48 | N/A |
| ASO-12 | 35.94 | >500 | 0.60 | N/A |
| ASO-13 | 29.44 | >500 | 067 | N/A |
| ASO-14 | 35.33 | >500 | 0.63 | N/A |
| ASO-15 | 28.25 | >500 | 1 | N/A |
| ASO-16 | >500 | >500 | 1.1 | N/A |
| ASO-17 | >167 | >167 | 0.41 | N/A |
| ASO-18 | 3.7 | >167 | 0.72 | 0.99 |
| ASO-19 | 3.2 | >167 | 0.79 | 1.0 |
| ASO-20 | 10.62 | >500 | 0.89 | N/A |
| ASO-21 | 9.28 | >500 | 0.98 | N/A |
| ASO-22 | 7.68 | >500 | 0.94 | N/A |
| ASO-23 | 5.90 | >500 | 0.96 | N/A |
| ASO-24 | 5.5 | 104.459 | N/A | N/A |
| ASO-25 | 6.4 | 151.324 | N/A | N/A |
| ASO-26 | 16 | 117.456 | N/A | N/A |
| ASO-27 | 5.6 | 148.018 | N/A | N/A |
| ASO-28 | 4.8 | 115.167 | N/A | N/A |
| ASO-29 | 4.3 | 137.998 | N/A | N/A |
| ASO-30 | 5.2 | 154.412 | N/A | N/A |
| ASO-31 | 5.2 | 122.362 | N/A | N/A |
| ASO-32 | 5.1 | 147.796 | N/A | N/A |
| ASO-33 | 4.5 | 158.769 | N/A | N/A |
| ASO-34 | 5.6 | 162.855 | N/A | N/A |
| ASO-35 | 6.93 | >500 | 0.96 | N/A |
| ASO-36 | 6.35 | >500 | 0.94 | N/A |
| ASO-37 | 3.56 | >500 | 0.92 | N/A |
| ASO-38 | 9.27 | 172.05 | 0.98 | N/A |
| ASO-40 | 5.43 | 155.97 | 0.82 | N/A |
| ASO-41 | 14 | >500 | 0.71 | N/A |
| ASO-42 | 17 | >500 | 0.75 | N/A |
| ASO-43 | 15 | >500 | 0.71 | N/A |
| ASO-44 | 17 | >500 | 0.76 | N/A |
| ASO-45 | 6.93 | 150.48 | 0.78 | N/A |
| ASO-46 | 4.28 | 165.65 | 0.99 | N/A |
| ASO-47 | 3.43 | 166.67 | 0.95 | N/A |
| ASO-48 | 6.66 | >500 | 0.98 | 0.96 |
| ASO-49 | 7.0 | >500 | 0.78 | 0.84 |
| ASO-50 | 11.02 | >500 | 0.46 | 0.81 |
| ASO-51 | 6.05 | >500 | 1.1 | 0.94 |
| ASO-52 | 9.54 | >500 | 0.82 | 0.56 |
| ASO-53 | 9.10 | >500 | 0.92 | 0.67 |
| ASO-54 | 5.55 | >500 | 0.98 | 0.90 |
| ASO-55 | 5.04 | >500 | 1.1 | 0.78 |
| ASO-56 | 18.31 | >500 | 1.2 | 0.79 |
| ASO-57 | N/A | N/A | 0.61 | N/A |
| ASO-58 | N/A | N/A | 0.63 | N/A |
| ASO-59 | N/A | N/A | 0.66 | N/A |
| ASO-60 | N/A | N/A | 0.77 | N/A |
| ASO-61 | N/A | N/A | 0.76 | N/A |
| ASO-62 | N/A | N/A | 0.71 | N/A |
| ASO-63 | N/A | N/A | 0.71 | N/A |
| ASO-64 | N/A | N/A | 0.64 | N/A |
| ASO-65 | N/A | N/A | 0.61 | N/A |
| ASO-66 | N/A | N/A | 0.86 | N/A |
| ASO-67 | 10.08 | >500 | 1.1 | N/A |
| ASO-68 | 11.76 | >500 | 0.67 | N/A |
| ASO-69 | 8.18 | >500 | 1.1 | N/A |
| ASO-70 | 9.17 | >500 | 1.0 | N/A |
| ASO-71 | 11.61 | >500 | 1.1 | N/A |
| ASO-72 | 9.33 | >500 | 1.1 | N/A |
| ASO-73 | 12.05 | >500 | 1.1 | N/A |
| ASO-74 | 8.08 | >500 | 1.0 | N/A |
| ASO-75 | 10.74 | >500 | 1.1 | N/A |
| ASO-76 | 11.78 | >500 | 1.1 | N/A |
| ASO-77 | 10.62 | >500 | 0.67 | N/A |
| ASO-78 | 9.8 | >500 | 0.72 | N/A |
| ASO-79 | 7.68 | >500 | 1.1 | N/A |
| ASO-80 | 5.71 | >500 | 1.1 | N/A |
| ASO-81 | 4.96 | >500 | 1.0 | N/A |
| ASO-82 | 8.16 | >500 | 1.2 | N/A |
| ASO-83 | 5.28 | >500 | 1.1 | N/A |
| ASO-84 | 9.94 | >500 | 1.0 | N/A |
| ASO-85 | 8.03 | >500 | 1.1 | N/A |
| ASO-86 | 7.66 | >500 | 1.1 | N/A |
| ASO-87 | 5.77 | >500 | 1.1 | N/A |
| ASO-88 | 6.63 | >500 | 1.1 | N/A |
| ASO-89 | 6.72 | >500 | 1.1 | N/A |
| ASO-90 | 9.76 | >500 | 1.0 | 0.88 |
| ASO-91 | 7.20 | >500 | 0.62 | 1.1 |
| ASO-92 | 8.61 | >500 | 1.0 | 1.1 |
| ASO-93 | 9.58 | >500 | 0.49 | 0.93 |
| ASO-94 | 8.41 | >500 | 0.82 | 0.92 |
| ASO-95 | 8.23 | >500 | 0.49 | 1.0 |
| ASO-96 | 11.25 | >500 | 0.71 | 0.99 |
| ASO-97 | 8.27 | >500 | 0.93 | 1.1 |
| ASO-98 | 12.46 | >500 | 0.84 | 1.1 |
| ASO-99 | 10.76 | >500 | 1.3 | 1.1 |
| ASO-100 | 10.62 | >500 | 0.98 | 0.91 |
| ASO-101 | 8.91 | >500 | 1.1 | 1.1 |
| ASO-102 | 7.25 | >500 | 0.95 | 1.1 |
| ASO-103 | 6.603 | >500 | 0.83 | 1.2 |
| ASO-104 | 6.69 | >500 | 0.89 | 1.1 |
| ASO-105 | 8.93 | >500 | 0.84 | 1.2 |
| ASO-106 | 11.98 | >500 | 0.83 | 1.0 |
| ASO-107 | 6.57 | >500 | 0.94 | 1.1 |
| ASO-108 | 6.41 | >500 | 0.84 | 0.61 |
| ASO-109 | 7.83 | >500 | 1.4 | 1.0 |
| ASO-110 | 7.075 | >500 | 1.3 | 0.76 |
| ASO-111 | 7.47 | >500 | 1.2 | 0.73 |
| ASO-112 | 7.67 | >500 | 1.3 | 0.72 |
| ASO-113 | 9.03 | >500 | 1.5 | 0.74 |
| ASO-114 | 6.18 | >500 | 1.7 | 0.73 |
| ASO-115 | 7.88 | >500 | 1.3 | 0.75 |
| ASO-116 | 8.81 | >500 | 1.5 | 0.85 |
| ASO-117 | 7.71 | >500 | 1.2 | 0.80 |
| ASO-118 | 3.87 | >500 | 0.99 | 0.91 |
| ASO-121 | 8.26 | >500 | 0.72 | 0.61 |
| ASO-122 | 7.70 | >500 | 1.1 | 0.82 |
| ASO-123 | 6.59 | >500 | 1.2 | 0.95 |
| ASO-124 | 3.08 | >500 | 1.2 | 0.91 |
| ASO-125 | 5.40 | >500 | 1.1 | 0.90 |
| ASO-126 | 5.55 | >500 | 1.2 | 0.86 |
| ASO-127 | 1.88 | >500 | 1.1 | 0.95 |
| ASO-128 | 7.76 | >500 | 1.06 | 0.92 |
| ASO-129 | 3.96 | >500 | 1.03 | 0.96 |
| ASO-130 | 5.27 | 158.1 | 0.92 | 1.04 |
| ASO-131 | 3.36 | >500 | 0.90 | 0.96 |
| ASO-132 | 3.22 | 158.13 | 0.94 | 0.997 |
| ASO-133 | 3.92 | >500 | 0.96 | 1.04 |
| ASO-134 | 5.08 | >500 | 0.85 | 0.787 |
| ASO-135 | 3.94 | 173.9 | 0.88 | 0.843 |
| ASO-136 | 0.69 | >500 | 0.81 | 0.756 |
| ASO-137 | 6.93 | >500 | 0.91 | 0.739 |
| ASO-138 | 4.91 | >500 | 0.98 | 0.90 |
| ASO-140 | 11.46 | >500 | 1.18 | 0.95 |
| ASO-141 | 13.45 | >500 | 1.06 | 1.1 |
| ASO-142 | 7.17 | >500 | 1.00 | 1.1 |
| ASO-143 | 8.73 | >500 | 0.75 | 1.1 |
| ASO-144 | 12.39 | >500 | 1.05 | 0.95 |
| ASO-145 | 9.29 | >500 | 1.30 | 1.0 |
| ASO-146 | 9.91 | >500 | 1.05 | 1.1 |
| ASO-147 | 9.61 | >500 | 1.06 | 1.1 |
| ASO-148 | 7.40 | >500 | 1.14 | 1.1 |
| ASO-149 | 9.84 | >500 | 1.14 | 1.0 |
| ASO-150 | 6.68 | >500 | 1.04 | 1.1 |
| ASO-151 | 9.59 | >500 | 1.38 | 0.85 |
| ASO-152 | 9.69 | >500 | 1.43 | 1.1 |
| ASO-153 | 10.39 | >500 | 1.73 | 1.1 |
| ASO-154 | 7.83 | >500 | 1.33 | 1.045 |
| ASO-155 | 7.08 | >500 | 1.49 | 1.038 |
| ASO-156 | 7.47 | 484.39 | 1.24 | 1.064 |
| ASO-157 | 7.67 | >500 | 1.34 | 0.879 |
| ASO-158 | 9.03 | >500 | 1.32 | 0.858 |
| ASO-159 | 6.18 | >500 | 1.37 | 0.940 |
| ASO-160 | 7.88 | >500 | 1.34 | 0.933 |
| ASO-161 | 8.81 | >500 | 1.13 | 1.033 |
| ASO-162 | 7.71 | >500 | 0.89 | 0.944 |
| ASO-163 | 3.87 | >500 | 1.20 | 0.816 |
| ASO-164 | 8.76 | >500 | 1.2 | 1.1 |
| ASO-165 | 6.90 | >500 | 1.2 | 1.1 |
| ASO-166 | 8.27 | >500 | 1.2 | 1.1 |
| ASO-167 | 13.23 | >500 | 1.1 | 1.1 |
| ASO-168 | 7.87 | >500 | 0.92 | 1.3 |
| ASO-170 | 4.53 | >500 | 1.3 | 1.1 |
| ASO-171 | 5.32 | >500 | 1.5 | 1.1 |
| ASO-172 | 6.81 | >500 | 1.2 | 1.2 |
| ASO-173 | 6.78 | >500 | 1.3 | 1.1 |
| ASO-174 | 2.21 | >500 | 1.36 | 1.2 |
| ASO-175 | 3.41 | >500 | 1.23 | 1.1 |
| ASO-176 | 4.83 | >500 | 1.60 | 1.3 |
| ASO-177 | 4.98 | >500 | 1.52 | 1.2 |
| ASO-178 | 4.71 | >500 | 1.50 | 1.2 |
| ASO-179 | 3.97 | 179.33 | 1.20 | 1.3 |
| ASO-180 | 3.35 | >500 | 1.32 | 1.2 |
| ASO-181 | 6.50 | >500 | 1.38 | 1.2 |
| ASO-182 | 3.36 | >500 | 1.52 | 1.2 |
| ASO-183 | 2.62 | >500 | 1.02 | 1.3 |
| ASO-184 | 3.00 | >500 | 1.11 | 1.1 |
| ASO-209 | 2.26 | 105.7 | 1.6 | 1.1 |
| ASO-210 | 3.105 | 83.43 | 1.5 | 1.1 |
| ASO-211 | 3.98 | 97.68 | 1.7 | 1.1 |
| ASO-212 | 3.21 | 105.5 | 1.6 | 1.2 |
| ASO-213 | 3.06 | 102.9 | 1.5 | 1.2 |
| ASO-214 | 2.66 | >500 | 1.2 | 1.2 |
| ASO-215 | 2.53 | 126.7 | 1.8 | 0.94 |
| ASO-216 | 3.61 | 131.8 | 1.8 | 0.99 |
| ASO-217 | 3.24 | 123.9 | 1.7 | 1.1 |
| ASO-218 | 3.77 | 176.2 | 1.3 | 1.1 |
| ASO-219 | 2.5 | 184.0 | 1.2 | 1.5 |
| ASO-220 | 0.90 | 55.4 | 1.4 | 1.6 |
| ASO-221 | 1.90 | 143.6 | 1.5 | 1.6 |
| ASO-222 | 1.23 | >500 | 1.5 | 1.0 |

TABLE 4
Caspase Activation for ASOs with Two or More LNAs at 56 nM

| | Caspase Activity |
|---|---|
| | Fold Change vs. |
| ASO ID NO. | Control |
| ASO-1 | 1 |
| ASO-174 | 1.7 |
| ASO-175 | 1.5 |
| ASO-176 | 1.5 |
| ASO-177 | 1.2 |
| ASO-178 | 1.1 |
| ASO-179 | 1.8 |
| ASO-180 | 1.1 |
| ASO-181 | 1.1 |
| ASO-182 | 1.1 |
| ASO-183 | 1.6 |
| ASO-184 | 1.8 |
| ASO-209 | 1.3 |
| ASO-210 | 1.2 |
| ASO-211 | 1.2 |
| ASO-212 | 1.2 |
| ASO-213 | 1.1 |
| ASO-214 | 1.8 |
| ASO-215 | 1.1 |
| ASO-216 | 1.0 |
| ASO-217 | 0.94 |
| ASO-218 | 1.2 |
| ASO-219 | 1.5 |
| ASO-220 | 2.0 |
| ASO-221 | 1.9 |
| ASO-222 | 1.2 |

### Example 4: Preparation of Key Intermediate 6S-1 & 6R-1 for Example 5 and 6 Dimers

[chemical structure]

[chemical structure]

[chemical structure]

[0270] Preparation of (2): To a solution of 1 (50.0 g, 71.8 mmol) in dioxane (500 mL) was added DCC (22.8 g, 111.1 mmol) and DMAP (4.5 g, 37.0 mmol). Then added Lev acid (52.2 g, 442.8 mmol) at 0° C. and the reaction mixture was stirred at room temperature for 1 hour. LCMS showed 1 was consumed completely. The reaction mixture was quenched by NaHCO₃ and extraction with DCM. And the organic phase was washed with water and saturated brine and dried over by Na₂SO₄. Then the solution was concentrated under reduced pressure. This resulted in 3 (59.0 g, crude) as solid which was used directly for the next step. ESI-LCMS: m/z 810.2 [M+H]+.

[0271] Preparation of (3): To a solution of 2 (57.0 g) was dissolved 6% of DCA in DCM (1.7 L) was added TES (17.0 g, 146.0 mmol) at room temperature (r.t.). The mixture was stirred at rt. for 10-20 min. LCMS and TLC show 2 was completely consumed. The reaction was quenched by the addition of sat. NaHCO₃ (aq.). The resulting mixture was extracted with DCM. Then the combined organic layers were washed the organic phase once with saturated brine and dried over by Na₂SO₄. Then the solution was concentrated under reduced pressure. This resulted was purified by silica gel column chromatograph (eluent, PE:EA=3:1-1:2). This resulted in 3 (26.0 g, 51.1 mmol) as a white solid. ESI-LCMS: m/z 828.2 [M−H]⁻

[0272] Preparation of (4): To a solution of 3 (24.0 g, 47.1 mmol) and 3a (46.0 g, 49.5 mmol) in ACN (240 mL) was added molecular sieve and was stirred at room temperature for 15 minutes. Then the mixture was added BTT (0.3 M, 235.5 mL) and stirred at room temperature for 0.5 hour. LCMS showed 3 was consumed completely. The mixture used for directly.

[0273] Preparation of (5R & 5S): The mixture was added pyridine and xanthane hydride (14.1 g, 94.2 mmol) then was stirred at room temperature for 15 minutes. After filter, the mixture was extracted with EA, washed with water and brine then dried over by anhydrous Na₂SO₄. The mixture was concentrated to give the crude (52.0 g 37.9 mmol). The mixture used for directly. ESI-LCMS: m/z 1370.2 [M−H]⁻. ³¹P-NMR (400 MHZ, DMSO-d6): δ 67.12, 66.94.

[0274] Preparation of (6R-1 & 6S-1): To a solution of 5 (23.0 52.0 g, 16.7 mmol) was dissolved 6% of DCA in DCM (230 mL) was added TES (2.9 g, 20.0 mmol) at r.t. The mixture was stirred at rt. for 10-20 min. LCMS and TLC show 5 was completely consumed. The reaction was quenched by the addition of sat. NaHCO₃ (aq.). The resulting mixture was extracted with DCM. Then the combined organic layers were washed the organic phase once with saturated brine and dried over by Na₂SO₄. Then washed the organic phase once with saturated brine and dried over by Na₂SO₄. Then the solution was concentrated under reduced pressure. The residue was purified by Flash-Prep-HPLC with the following conditions (IntelFlash-1): Column, C18 silica gel; mobile phase, CH₃CN/H₂O (0.5% NH₄HCO₃)=2/3 increasing to CH₃CN/H₂O (0.5% NH₄HCO₃)=1/0 within 25 min, the eluted product was collected at CH₃CN/H₂O (0.5% NH₄HCO₃)=2/1; Detector, UV 254 nm. This resulted was purified by SFC. This resulted in 6R-1 (5.5 g, 4.6 mmol) and 6S-1 (5.0 g, 5.1 mmol) as a white solid. ESI-LCMS: m/z 1070.2 [M+H]⁻; ³¹P-NMR (400 MHZ, DMSO-d6): δ 66.90, 66.82.

### Example 5: Preparation of Example 5 Dimer from Intermediate 6S-1

[chemical structure]

[chemical structure]

[0275] Preparation of (5S): To a stirred mixture of 6S-1 (4.8 g, 4.4 mmol) in pyridine (48 mL) was added DMAP (105 mg, 0.89 mmol) and DMTrCl (1.9 g, 5.71 mmol) at r.t under N₂ atmosphere. The resulting mixture was stirred at r.t under argon atmosphere for 24 h. LCMS and TLC show SM was completely consumed. The reaction was quenched by the addition of sat. NaHCO₃ (aq.). The resulting mixture was extracted with EA. And the organic phase was washed with water and saturated brine and dried over by Na₂SO₄. Then the solution was concentrated under reduced pressure. This resulted in crude 5S (6.0 g) as a solid used directly next step. ESI-LCMS: m/z 1370.2 [M−H].

[0276] Preparation of (6S): To a solution of 7S (6.0 g, 4.3 mmol) in ACN (60 mL) was added N2H₄ (0.5M, 43 mL) at 0° C. The reaction was stirred at 0° C. for 0.5 hour. LCMS showed 7S was consumed completely. The reaction mixture was quenched by 2,4-pentanedione at 0° C. for 15 minutes and extraction with EA. The organic layer was washed with H₂O and brine. Then the solution was concentrated under reduced pressure and the residue was purified by Flash-Prep-HPLC with the following conditions (IntelFlash-1): Column, C18 silica gel; mobile phase, CH₃CN/H₂O (0.5% NH₄HCO₃)=1/3 increasing to CH₃CN/H₂O (0.5% NH₄HCO₃)=1/0 within 25 min, the eluted product was collected at CH₃CN/H₂O (0.5% NH₄HCO₃)=1/1; Detector, UV 254 nm. This resulted in 6S (3.3 g, 87.5% yield) as a white solid. ESI-LCMS: m/z 1272.2 [M−H]⁻; ¹H NMR (400 MHZ, DMSO-d₆) δ 12.11 (s, 1H), 11.65 (s, 1H), 11.26 (s, 1H), 8.61 (dt, J=19.2, 1.5 Hz, 2H), 8.22 (t, J=1.7 Hz, 1H), 8.17-7.97 (m, 2H), 7.64 (t, J=7.4 Hz, 1H), 7.55 (t, J=7.6 Hz, 2H), 7.48-7.34 (m, 2H), 7.33-7.21 (m, 8H), 6.84 (d, J=8.5 Hz, 4H), 6.20 (dt, J=6.9, 2.0 Hz, 1H), 5.98 (dt, J=5.8, 2.0 Hz, 1H), 5.43 (dt, J=5.3, 1.4 Hz, 1H), 5.41-5.30 (m, 1H), 4.55-4.37 (m, 3H), 4.29 (q, J=7.6, 6.6 Hz, 4H), 4.21-4.14 (m, 1H), 3.60 (ddd, J=22.4, 10.9, 5.8 Hz, 2H), 3.42 (t, J=4.8 Hz, 2H), 3.39-3.24 (m, 4H), 3.17 (s, 3H), 3.03 (t, J=1.1 Hz, 3H), 2.94 (t, J=5.9 Hz, 2H), 2.77 (h, J=7.0 Hz, 1H), 1.10 (dd, J=13.5, 6.7 Hz, 6H).

[0277] Preparation of Example 5 Dimer: To a solution of 6S (3.0 g, 2.0 mmol) in DCM (30 mL) was added DCI (200 mg, 1.7 mmol) and CEP[N(iPr)₂]₂ (842 mg, 2.8 mmol) at r.t at N₂. The mixture was stirred at r.t at N₂ for 2 h. LC-MS showed all precursor was consumed completely. The mixture was added NaHCO₃ aqueous (30 mL) and extracted with DCM. The organic layer was washed with H₂O and brine. Then the solution was concentrated under reduced pressure and the residue was purified by Flash-Prep-HPLC with the following conditions (IntelFlash-1): Column, C18 silica gel; mobile phase, CH₃CN/H₂O (0.5% NH₄HCO₃)=1/3 increasing to CH₃CN/H₂O (0.5% NH₄HCO₃)=1/0 within 25 min, the eluted product was collected at CH₃CN/H₂O (0.5% NH₄HCO₃)=1/0; Detector, UV 254 nm. This resulted in Example 5 dimer (2.0 g, 1.3 mmol, 74% yield,) as a white solid. ESI-LCMS: m/z 1472.2 [M−H]^{- 1}H NMR (600 MHZ, DMSO-d₆) δ 11.62 (s, 1H), 8.72-8.47 (m, 2H), 8.32-7.99 (m, 3H), 7.69-7.49 (m, 3H), 7.46-7.18 (m, 9H), 6.95-6.78 (m, 4H), 6.21 (s, 1H), 6.15-5.82 (m, 1H), 5.52-5.05 (m, 2H), 4.84-4.51 (m, 2H), 4.49-4.09 (m, 6H), 3.92-3.49 (m, 14H), 3.45-3.35 (m, 3H), 3.29-3.21 (m, 2H), 3.20-3.10 (m, 3H), 3.01-2.86 (m, 5H), 2.80 (dt, J=30.9, 6.2 Hz, 3H), 1.25-1.08 (m, 19H). ³¹P NMR (243 MHz, DMSO-d₆) δ 150.26, 149.87, 66.96.

### Example 6: Preparation of Example 6 Dimer from Intermediate 6R-1

[chemical structure]

[0278] Preparation of (5R): To a stirred mixture of 6R-1 (4.8 g, 4.4 mmol) in pyridine (48 mL) was added DMAP (105 mg, 0.89 mmol) and DMTrCl (1.9 g, 5.71 mmol) at r.t under N₂ atmosphere. The resulting mixture was stirred at r.t under argon atmosphere for 24 h. LCMS and TLC show SM was completely consumed. The reaction was quenched by the addition of sat. NaHCO₃ (aq.). The resulting mixture was extracted with EA. The reaction was quenched by the addition of sat. NaHCO₃ (aq.). The resulting mixture was extracted with EA. And the organic phase was washed with water and saturated brine and dried over by Na₂SO₄. Then the solution was concentrated under reduced pressure. This resulted in crude 5R (6.0 g) as a solid used directly next step. ESI-LCMS: m/z 1370.2 [M−H]⁻.

[0279] Preparation of (6R): To a solution of 5R (4.7 g, 3.7 mmol) in ACN (47.0 mL) was added N₂H₄ (0.5M, 37.0 mL) at 0° C. The reaction was stirred at 0° C. for 0.5 hour. LCMS showed 5R was consumed completely. The reaction mixture was quenched by 2,4-pentanedione at 0° C. for 15 minutes and extraction with EA. The organic layer was washed with H₂O and brine. Then the solution was concentrated under reduced pressure and the residue was purified by Flash-Prep-HPLC with the following conditions (IntelFlash-1): Column, C18 silica gel; mobile phase, CH₃CN/H₂O (0.5% NH₄HCO₃)=1/3 increasing to CH₃CN/H₂O (0.5% NH₄HCO₃)=1/0 within 25 min, the eluted product was collected at CH₃CN/H₂O (0.5% NH₄HCO₃)=1/1; Detector, UV 254 nm. This resulted in 6R (3.0 g, 2.0 mmol, 65% yield) as a white solid. ESI-LCMS: m/z 1272.2 [M−H]⁻; ¹H NMR (400 MHZ, DMSO-d₆) δ 12.11 (s, 1H), 11.65 (s, 1H), 11.26 (s, 1H), 8.61 (dt, J=19.2, 1.5 Hz, 2H), 8.22 (t, J=1.7 Hz, 3H), 8.13-7.90 (m, 2H), 7.64 (t, J=7.4 Hz, 1H), 7.55 (t, J=7.6 Hz, 2H), 7.44-7.33 (m, 2H), 7.33-7.01 (m, 12H), 6.84 (d, J=8.5 Hz, 4H), 6.20 (dt, J=6.9, 2.0 Hz, 1H), 5.98 (dt, J=5.8, 2.0 Hz, 1H), 5.43 (dt, J=5.3, 1.4 Hz, 1H), 5.41-5.31 (m, 1H), 4.58-4.38 (m, 3H), 4.29 (q, J=7.6, 6.6 Hz, 4H), 4.22-4.12 (m, 1H), 3.60 (ddd, J=22.4, 10.9, 5.8 Hz, 2H), 3.42 (t, J=4.8 Hz, 3H), 3.17 (s, 3H), 3.03 (t, J=1.1 Hz, 3H), 2.94 (t, J=5.9 Hz, 2H), 2.77 (h, J=7.0 Hz, 1H), 2.29 (s, 3H), 1.10 (dd, J=13.5, 6.7 Hz, 6H). ³¹P NMR: δ 67.14.

[0280] Preparation of Example 6 Dimer: To a solution of 6R (3.0 g, 2.4 mmol) in DCM (30.0 mL) with an inert atmosphere of nitrogen was added CEOP[N(iPr)₂]₂ (933.1 mg, 3.1 mmol) and DCI (240.7 mg, 2.1 mmol) in order at room temperature. The resulting solution was stirred for 1.0 hour at room temperature and diluted with 50.0 mL dichloromethane and washed with 2×5.0 mL of saturated aqueous sodium bicarbonate and 1×50.0 mL of saturated aqueous sodium chloride respectively. The organic phase was dried over anhydrous sodium sulfate, filtered and concentrated till no residual solvent left under reduced pressure. The residue was purified by Flash-Prep-HPLC with the following conditions (IntelFlash-1): Column, C18 silica gel; mobile phase, CH₃CN/H₂O (0.5% NH₄HCO₃)=1/1 increasing to CH₃CN/H₂O (0.5% NH₄HCO₃)=1/0 within 20 min, the eluted product was collected at CH₃CN/H₂O (0.5% NH₄HCO₃)=9/1; Detector, UV 254 nm. This resulted in Example 6 dimer (1.9 g, 1.3 mmol, 56% yield) as yellow solid. ESI-LCMS: m/z 1472.2 [M−H]⁻; ¹H-NMR (400 MHZ, DMSO-d₆): δ11.31-11.12 (m, 2H), 8.70-8.58 (m, 3H), 8.05-8.00 (m, 4H), 7.98-7.26 (m, 15H), 7.26-7.25 (m, 1H), 6.91-6.88 (m, 4H), 6.62-6.59 (m, 1H), 6.01-5.76 (m, 2H), 5.24-5.50 (m, 2H), 4.70-4.00 (m, 6H), 3.98-3.82 (2H), 3.73-3.72 (m, 6H), 3.45-3.33 (m, 4H), 1.20-1.16 (m, 12H); ³¹P-NMR (162 MHZ, DMSO-d6): δ 150.16, 149.92, 66.83, 66.74.

### Example 7: Preparation of Key Intermediate 6S and 6R for Example 8 and Example 9 Dimers

[chemical structure]

[chemical structure]

[0281] Preparation of (2): To a solution of 1 (48.0 g, 75.0 mmol) in dioxane (480 mL) was added DCC (23.2 g, 112.5 mmol) and DMAP (4.2 g, 34.5 mmol). Then added Lev acid (52.2 g, 450.0 mmol) at 0° C. and the reaction mixture was stirred at room temperature for 1 hour. LCMS showed 1 was consumed completely. The reaction mixture was quenched by NaHCO₃ and extraction with DCM. And the organic phase was washed with water and saturated brine and dried over by Na₂SO₄. Then the solution was concentrated under reduced pressure. This resulted in 3 (45.3 g, crude) as solid which was used directly for the next step. ESI-LCMS: m/z 736.3 [M+H]+.

[0282] Preparation of (3): To a solution of 2 (45.3 g, 61.5 mmol) was dissolved 6% of DCA in DCM (450 mL) was added TES (10.7 g, 92.3 mmol) at r.t. The mixture was stirred at rt. for 10-20 min. LCMS and TLC show 2 was completely consumed. The reaction was quenched by the addition of sat. NaHCO₃ (aq.). The resulting mixture was extracted with DCM. And the organic phase was washed with water and saturated brine and dried over by Na₂SO₄. Then the solution was concentrated under reduced pressure. The residue was purified by silica gel column chromatograph (eluent, PE/EA=3:1-1:2). This resulted in 3 (21.4 g, 80.0% yield) as a white solid. ESI-LCMS: m/z 436.1 [M+H]+

[0283] Preparation of (4): To a solution of 3 (21.4 g, 49.2 mmol) and 3a (41.7 g, 44.7 mmol) in ACN (420.0 mL) was added molecular sieve and was stirred at room temperature for 15 minutes. Then the mixture was added BTT (0.3 M, 201.3 mL) and stirred at room temperature for 0.5 hour. LCMS showed 3 was consumed completely. The mixture used for directly.

[0284] Preparation of (5R & 5S): The mixture was added pyridine and xanthane hydride (10.1 g, 67.2 mmol) then was stirred at room temperature for 15 minutes. After filter, the mixture was extracted with EA. And the organic phase was washed with water and saturated brine and dried over by Na₂SO₄. Then the solution was concentrated under reduced pressure. This resulted in the crude 5R&5S (20.0 g). The mixture used for directly; ESI-LCMS: m/z 1298.4 [M+H]+.

[0285] Preparation of (6R & 6S): To a solution of 5R & 5S (15.0 g, 11.6 mmol) was dissolved 6% of DCA in DCM (150 mL) was added TES (1.3 g, 17.4 mmol) at r.t. The mixture was stirred at rt. for 10-20 min. LCMS and TLC show SM was completely consumed. The reaction was quenched by the addition of sat. NaHCO₃ (aq.). The resulting mixture was extracted with DCM. Then washed the organic phase once with saturated brine and dried over by Na₂SO₄. Then the solution was concentrated under reduced pressure. The residue was purified by silica gel column chromatography (eluent, PE:EA=2: 1˜1:1). The residue was purified by Flash-Prep-HPLC with the following conditions (IntelFlash-1): Column, C18 silica gel; mobile phase, CH₃CN/H₂O (0.5% NH₄HCO₃)=2/3 increasing to CH₃CN/H₂O (0.5% NH₄HCO₃)=1/0 within 25 min, the eluted product was collected at CH₃CN/H₂O (0.5% NH₄HCO₃)=8/1; Detector, UV 254 nm. This resulted in 6R (4.5 g) and 6S (6.4 g) as a white solid. ESI-LCMS: m/z 996.1 [M+H]+; 1H-NMR (400 MHZ, DMSO-d6): δ 11.31-11.17 (m, 2H), 8.73-8.56 (m, 3H), 8.05-8.00 (m, 4H), 7.98-7.28 (m, 16H), 7.26-7.25 (m, 1H), 6.91-6.87 (m, 4H), 6.62-6.59 (m, 1H), 6.01-5.79 (m, 3H), 5.21-5.02 (m, 1H), 4.70-4.00 (m, 6H), 3.74-3.72 (m, 6H), 3.50-3.34 (m, 4H), 2.78-2.50 (m, 6H), 2.12-2.08 (m, 3H); 31P-NMR (162 MHz, DMSO-d6): δ 68.37, 67.91, 66.82, 66.47.

### Example 8: Preparation of Example 8 Dimer from 6S

[chemical structure]

[0286] Preparation of (7S): To a stirred mixture of 6S (6.4 g, 6.4 mmol) in pyridine (65 mL) was added DMAP (156 mg, 12.8 mmol) and DMTrCl (4.3 g, 12.8 mmol) at r.t under N₂ atmosphere. The resulting mixture was stirred at r.t under argon atmosphere for 24 h. LCMS and TLC show SM was completely consumed. The reaction was quenched by the addition of sat. NaHCO₃ (aq.). The resulting mixture was extracted with EA. And the organic phase was washed with water and saturated brine and dried over by Na₂SO₄. Then the solution was concentrated under reduced pressure. The residue was purified by silica gel column chromatograph (eluent, DCM (0.5% pyridine) THF=1:0-0:1). This resulted in 7S (22.0 g) as a white solid. ESI-LCMS m/z 1298.0 [M+H]⁺.

[0287] Preparation of (8S): To a solution of 7S (4.5 g, 3.5 mmol) in ACN (35 mL) was added N₂H₄ (0.5M, 17.5 ml) at 0° C. The reaction was stirred at 0° C. for 0.5 hour. LCMS showed 7S was consumed completely. The reaction mixture was quenched by 2,4-pentanedione at 0° C. for 15 minutes and extraction with EA. The organic layer was washed with H₂O and brine. Then the solution was concentrated under reduced pressure and the residue was purified by Flash-Prep-HPLC with the following conditions (IntelFlash-1): Column, C18 silica gel; mobile phase, CH₃CN/H₂O (0.5% NH₄HCO₃)=1/3 increasing to CH₃CN/H₂O (0.5% NH₄HCO₃)=1/0 within 25 min, the eluted product was collected at CH₃CN/H₂O (0.5% NH₄HCO₃)=1/1; Detector, UV 254 nm. This resulted in giving 8S (3.0 g, 72% yield) as a white solid. ESI-LCMS: m/z 1200.4 [M+H]+; 1H-NMR (400 MHZ, DMSO-d6): δ 11.31-11.12 (m, 2H), 8.73-8.52 (m, 3H), 8.04-8.03 (m, 4H), 7.99-7.26 (m, 15H), 7.26-7.25 (m, 1H), 6.91-6.87 (m, 4H), 6.62-6.59 (m, 1H), 6.01-5.79 (m, 2H), 5.68-5.56 (m, 1H), 5.21-5.02 (m, 1H), 4.70-4.00 (m, 6H), 3.73-3.72 (m, 6H), 3.50-3.45 (m, 4H), 2.90-2.80 (m, 2H); 31P-NMR (162 MHZ, DMSO-d6): δ 66.83, 66.58.

[0288] Preparation of Example 8 Dimer: To a solution of 8S (3.0 g, 2.5 mmol) in DCM (30 mL) with an inert atmosphere of nitrogen was added CEP[N(iPr)₂]₂ (979.6 mg, 3.2 mmol) and DCI (251 mg, 2.1 mmol) in order at room temperature. The resulting solution was stirred for 1.0 hour at room temperature and diluted with 30.0 mL dichloromethane and the organic layer was washed with H₂O and brine. Then the solution was concentrated under reduced pressure and the residue was purified by Flash-Prep-HPLC with the following conditions (IntelFlash-1): Column, C18 silica gel; mobile phase, CH₃CN/H₂O (0.5% NH₄HCO₃)=1/3 increasing to CH₃CN/H₂O (0.5% NH₄HCO₃)=1/0 within 25 min, the eluted product was collected at CH₃CN/H₂O (0.5% NH₄HCO₃)=1/0; Detector, UV 254 nm. This resulted in Example 8 dimer (2.0 g, 56% yield) as yellow solid. ESI-LCMS: m/z 1368.2 [M−H]−; 1H-NMR (400 MHZ, DMSO-d6): δ11.31-11.12 (m, 2H), 8.70-8.58 (m, 3H), 8.05-8.00 (m, 4H), 7.98-7.26 (m, 15H), 7.26-7.25 (m, 1H), 6.91-6.88 (m, 4H), 6.62-6.59 (m, 1H), 6.01-5.76 (m, 2H), 5.24-5.50 (m, 2H), 4.70-4.00 (m, 6H), 3.98-3.82 (2H), 3.73-3.72 (m, 6H), 3.45-3.33 (m, 4H), 1.20-1.16 (m, 12H); 31P-NMR (162 MHz, DMSO-d6): δ 150.16, 149.92, 66.83, 66.74.

### Example 9: Preparation of Example 9 Dimer from 6R

[chemical structure]

[0289] Preparation of (7R): To a stirred mixture of 6R (5.4 g, 5.4 mmol) in pyridine (55 mL) was added DMAP (134 mg, 1.1 mmol) and DMTrCl (3.6 g, 10.8 mmol) at r.t under N₂ atmosphere. The resulting mixture was stirred at r.t under argon atmosphere for 24 h. LCMS and TLC show SM was completely consumed. The reaction was quenched by the addition of sat. NaHCO₃ (aq.). The resulting mixture was extracted with EA. And the organic phase was washed with water and saturated brine and dried over by Na₂SO₄. Then the solution was concentrated under reduced pressure. The residue was purified by silica gel column chromatograph (eluent, DCM (0.5% pyridine) THF=1:0-0:1). This resulted in 7R (4.5 g, 49.6% yield) as a white solid. ESI-LCMS m/z1298.0 [M+H]⁺.

[0290] Preparation of (8R): To a solution of 7R (4.5 g, 3.5 mmol) in ACN (45 mL) was added N2H4 (0.5M, 17.5 ml) at 0° C. The reaction was stirred at 0° C. for 0.5 hour. LCMS showed 7S was consumed completely. The reaction mixture was quenched by 2,4-pentanedione at 0° C. for 15 minutes and extraction with EA. The organic layer was washed with H₂O and brine. Then the solution was concentrated under reduced pressure and the residue was purified by Flash-Prep-HPLC with the following conditions (IntelFlash-1): Column, C18 silica gel; mobile phase, CH₃CN/H₂O (0.5% NH₄HCO₃)=1/3 increasing to CH₃CN/H₂O (0.5% NH₄HCO₃)=1/0 within 25 min, the eluted product was collected at CH₃CN/H₂O (0.5% NH₄HCO₃)=1/1; Detector, UV 254 nm. This resulted in 8R (3.0 g, 72% yield) as a white solid. ESI-LCMS: m/z 1200.4 [M+H]+; 1H-NMR (400 MHZ, DMSO-d6): δ 11.31-11.12 (m, 2H), 8.73-8.52 (m, 3H), 8.04-8.03 (m, 4H), 7.99-7.26 (m, 15H), 7.26-7.25 (m, 1H), 6.91-6.87 (m, 4H), 6.62-6.59 (m, 1H), 6.01-5.79 (m, 2H), 5.68-5.56 (m, 1H), 5.21-5.02 (m, 1H), 4.70-4.00 (m, 6H), 3.73-3.72 (m, 6H), 3.50-3.45 (m, 4H), 2.90-2.80 (m, 2H); 31P-NMR (162 MHZ, DMSO-d6): δ 66.83, 66.58.

[0291] Preparation of Example 9 Dimer: To a solution of 8R (3.0 g, 2.5 mmol) in DCM (30 mL) with an inert atmosphere of nitrogen was added CEP[N(iPr)₂]₂ (979.6 mg, 3.2 mmol) and DCI (251 mg, 2.1 mmol) in order at room temperature. The resulting solution was stirred for 1.0 hour at room temperature and diluted with 30 mL dichloromethane. The organic layer was washed with H₂O and brine. Then the solution was concentrated under reduced pressure and the residue was purified by Flash-Prep-HPLC with the following conditions (IntelFlash-1): Column, C18 silica gel; mobile phase, CH₃CN/H₂O (0.5% NH₄HCO₃)=1/3 increasing to CH₃CN/H₂O (0.5% NH₄HCO₃)=1/0 within 25 min, the eluted product was collected at CH₃CN/H₂O (0.5% NH₄HCO₃)=1/0; Detector, UV 254 nm. This resulted in Example 9 dimer (2.0 g, 56% yield) as yellow solid. ESI-LCMS: m/z 1368.2 [M−H]−; 1H-NMR (400 MHZ, DMSO-d6): δ11.31-11.12 (m, 2H), 8.70-8.58 (m, 3H), 8.05-8.00 (m, 4H), 7.98-7.26 (m, 15H), 7.26-7.25 (m, 1H), 6.91-6.88 (m, 4H), 6.62-6.59 (m, 1H), 6.01-5.76 (m, 2H), 5.24-5.50 (m, 2H), 4.70-4.00 (m, 6H), 3.98-3.82 (2H), 3.73-3.72 (m, 6H), 3.45-3.33 (m, 4H), 1.20-1.16 (m, 12H); 31P-NMR (162 MHz, DMSO-d6): δ 150.16, 149.92, 66.83, 66.74.

### Example 10: Preparation of Key Intermediate 6S & 6R for Example 11 and 12 Dimers

[chemical structure]

[0292] Preparation of (2): To a solution of 1 (17.0 g, 23.5 mmol) in dioxane (170 mL) was added DCC (6.6 g, 35.3 mmol) and DMAP (5.8 g, 28.2 mmol). Then the mixture was added Lev acid (4.1 g, 352.5 mmol) at 0° C. and the reaction mixture was stirred at room temperature for 1 hour. LCMS showed 1 was consumed completely. The reaction mixture was quenched by NaHCO₃ and extraction with DCM, washed with water and brine then dried over by anhydrous Na₂SO₄. Then the solution was concentrated under reduced pressure to give crude 2 (15.0 g) as solid which was used directly for the next step. ESI-LCMS: m/z 818.2 [M+H]+.

[0293] Preparation of (3): To a solution of 2 (15.0 g, 18.3 mmol) was dissolved 6% of DCA in DCM (150 mL) was added TES (3.2 g, 27.5 mmol) at r.t. The mixture was stirred at rt. for 10-20 min. LCMS and TLC show 2 was completely consumed. The reaction was quenched by the addition of sat. NaHCO₃ (aq.). The resulting mixture was extracted with DCM. Then the combined organic layers were washed the organic phase once with saturated brine and dried over by Na₂SO₄. Then the solution was concentrated under reduced pressure. This resulted was purified by slurry with EA. This resulted in 3 (8.0 g, 15.4 mmol, 84% yield) as a white solid. ESI-LCMS: m/z 518.2 [M+H]⁺.

[0294] Preparation of (4): To a solution of 3 (7.9 g, 15.3 mmol) and 3a (12.4 g, 13.6 mmol) in ACN (420 mL) was added molecular sieve and was stirred at room temperature for 15 min. Then the mixture was added BTT (0.3 M, 68 mL) and stirred at room temperature for 0.5 hour. LCMS showed 3 was consumed completely. The mixture is used directly.

[0295] Preparation of (5S&5R): The mixture of 4 was added pyridine and xanthane hydride (3.0 g, 20.4 mmol) then was stirred at room temperature for 15 minutes. After filtering, the mixture was extracted with EA, washed with water and brine then dried over by anhydrous Na₂SO₄. The mixture was concentrated to give the crude 5S&5R (15.0 g, 33.0 mmol, 97.8% purity, S/R=46:53 by PNMR). The mixture is used directly. ESI-LCMS: m/z 1360.2 [M−H]^{+ 31}P-NMR (400 MHz, DMSO-d6): δ 67.12, 66.80.

[0296] Preparation of (6S&6R): To a solution of 5S&5R (15.0 g, 10.9 mmol) in ACN (150 mL) was added N₂H₄. H₂O (0.5M, 54 mL) at 0° C. The reaction was stirred at 0° C. for 0.5 hours. LCMS showed 5S&5R was consumed completely. The reaction mixture was quenched by 2,4-pentanedione at 0° C. for 15 minutes and extraction with EA. Then washed the organic phase once with saturated brine and dried over by Na₂SO₄. Then the solution was concentrated under reduced pressure. The residue was purified by Flash-Prep-HPLC with the following conditions (IntelFlash-1): Column, C18 silica gel; mobile phase, CH₃CN/H₂O (0.5% NH₄HCO₃)=2/3 increasing to CH₃CN/H₂O (0.5% NH₄HCO₃)=1/0 within 25 min, the eluted product was collected at CH₃CN/H₂O (0.5% NH₄HCO₃)=1/1; Detector, UV 254 nm. This resulted in was purified by SFC. This resulted in 6R (3.0 g, 2.5 mmol,) and 6S (3.0 g, 2.5 mmol) as a white solid. ESI-LCMS: m/z 1264.1 [M+H]⁺; 6R: 1H NMR (400 MHZ, DMSO-d₆): δ 12.97 (s, 1H), 12.05 (s, 1H), 11.62 (s, 1H), 8.25-8.06 (m, 3H), 7.76-7.08 (m, 16H), 6.92-6.76 (m, 4H), 6.01-5.82 (m, 2H), 5.43-5.34 (m, 1H), 5.26-5.13 (m, 1H), 4.99-4.88 (m, 1H), 4.40-4.02 (m, 8H), 3.82-3.54 (m, 10H), 3.51-3.27 (m, 5H), 3.22 (s, 3H), 3.12 (s, 3H), 3.00-2.90 (m, 2H), 2.80-2.65 (m, 1H), 1.97 (s, 3H), 1.11 (dd, J=6.8, 1.3 Hz, 6H); ³¹P-NMR (400 MHZ, DMSO-d6): δ 67.09.

[0297] 6S: ¹H NMR (400 MHZ, DMSO-d₆) δ 13.04 (s, 1H), 12.05 (s, 1H), 11.65 (s, 1H), 8.25-8.11 (m, 3H), 7.71-7.14 (m, 16H), 6.94-6.76 (m, 4H), 6.01-5.88 (m, 2H), 5.45-5.34 (m, 1H), 5.29-5.15 (m, 1H), 5.01-4.90 (m, 1H), 4.55-4.02 (m, 8H), 3.88-3.63 (m, 10H), 3.57-3.30 (m, 5H), 3.28 (s, 3H), 3.15 (s, 3H), 3.03-2.90 (m, 2H), 2.83-2.65 (m, 1H), 1.91 (s, 3H), 1.21-1.10 (m, 6H); ³¹P-NMR (400 MHZ, DMSO-d6): δ 66.81.

### Example 11: Preparation of Example 11 Dimer from Intermediate 6S

[chemical structure]

[0298] Preparation of Example 11 Dimer: To a solution of 6S (3.0 g, 2.4 mmol) in DCM (24 mL) with an inert atmosphere of nitrogen was added CEP[N(iPr)₂]₂ (928.7 mg, 3.1 mmol) and DCI (240 mg, 2.0 mmol) in order at room temperature. The resulting solution was stirred for 1.0 hour at room temperature and diluted with 50 mL dichloromethane and washed with 2×50 mL of saturated aqueous sodium bicarbonate and 1×50 mL of saturated aqueous sodium chloride respectively. The organic phase was dried over anhydrous sodium sulfate, filtered and concentrated till no residual solvent left under reduced pressure. The residue was purified by Flash-Prep-HPLC with the following conditions (IntelFlash-1): Column, C18 silica gel; mobile phase, CH₃CN/H₂O (0.5% NH₄HCO₃)=1/1 increasing to CH₃CN/H₂O (0.5% NH₄HCO₃)=1/0 within 20 min, the eluted product was collected at CH₃CN/H₂O (0.5% NH₄HCO₃)=9/1; Detector, UV 254 nm. This resulted in Example 11 dimer (2.0 g, 1.3 mmol, 70.6% yield) as yellow solid. ESI-LCMS: m/z 1464.4 [M+H]⁺; ¹H NMR (400 MHZ, DMSO-d₆): δ 12.90 (s, 1H), 11.94 (s, 1H), 11.52 (d, J=3.2 Hz, 1H), 8.14-7.94 (m, 3H), 7.65-7.48 (m, 2H), 7.42 (t, J=7.6 Hz, 2H), 7.30 (d, J=7.3 Hz, 2H), 7.23-7.10 (m, 7H), 6.86-6.67 (m, 4H), 5.92-5.73 (m, 2H), 5.12 (dt, J=11.3, 5.3 Hz, 1H), 4.91-4.75 (m, 1H), 4.52-4.05 (m, 7H), 3.84-3.46 (m, 14H), 3.43-3.22 (m, 6H), 3.15 (d, J=7.0 Hz, 4H), 3.03 (s, 3H), 2.84 (qd, J=5.6, 2.6 Hz, 2H), 2.76-2.57 (m, 3H), 1.81 (s, 3H), 1.18-0.96 (m, 18H); ³¹P NMR (162 MHZ, DMSO-d₆): δ 149.62, 149.44, 66.86, 66.80.

### Example 12: Preparation of Example 12 Dimer from Intermediate 6R

[chemical structure]

[0299] Preparation of Example 12 Dimer: To a solution of 6R (3.0 g, 2.4 mmol) in DCM (24 mL) with an inert atmosphere of nitrogen was added CEP[N(iPr)₂]₂ (928.7 mg, 3.1 mmol) and DCI (241 mg, 2.0 mmol) in order at room temperature. The resulting solution was stirred for 1.0 hour at room temperature and diluted with 50 mL dichloromethane and washed with 2×50 mL of saturated aqueous sodium bicarbonate and 1×50 mL of saturated aqueous sodium chloride respectively. The organic phase was dried over anhydrous sodium sulfate, filtered and concentrated till no residual solvent left under reduced pressure. The residue was purified by Flash-Prep-HPLC with the following conditions (IntelFlash-1): Column, C18 silica gel; mobile phase, CH₃CN/H₂O (0.5% NH₄HCO₃)=1/1 increasing to CH3CN/H₂O (0.5% NH₄HCO₃)=1/0 within 20 min, the eluted product was collected at CH₃CN/H₂O (0.5% NH₄HCO₃)=9/1; Detector, UV 254 nm. This resulted in Example 12 dimer (2.0 g, 1.3 mmol, 70.6% yield) as yellow solid. ESI-LCMS: m/z 1365.3 [M+H]⁺; ¹H NMR (400 MHZ, DMSO-d₆): δ 12.88 (s, 1H), 11.97 (s, 1H), 11.52 (s, 1H), 8.06 (dd, J=26.3, 6.1 Hz, 3H), 7.63 (d, J=9.2 Hz, 1H), 7.52 (t, J=7.4 Hz, 1H), 7.42 (t, J=7.6 Hz, 2H), 7.33-7.25 (m, 2H), 7.24-7.09 (m, 7H), 6.76 (td, J=5.8, 2.7 Hz, 4H), 5.88-5.70 (m, 2H), 5.22-5.05 (m, 1H), 4.86 (t, J=6.2 Hz, 1H), 4.41-4.03 (m, 5H), 3.90-3.44 (m, 14H), 3.43-3.23 (m, 5H), 3.14 (d, J=6.8 Hz, 4H), 3.05 (d, J=1.6 Hz, 3H), 2.88 (td, J=5.9, 2.4 Hz, 2H), 2.68 (dq, J=15.6, 6.4 Hz, 3H), 1.95-1.82 (m, 3H), 1.24-0.96 (m, 18H); ³¹P NMR (162 MHZ, DMSO-d₆): δ 149.56, 149.34, 67.43, 67.33.

### Example 13: Preparation of Key Intermediate 6S & 6R for Example 14 and 15 Dimers

[chemical structure]

[0300] Preparation of (2): To a solution of 1 (32.0 g, 22.6 mmol) in dioxane (320 mL) was added DCC (13.2 g, 64.0 mmol) and DMAP (6.3 g, 51.8 mmol). Then added Lev acid (7.2 g, 621.0 mmol) at 0° C. and the reaction mixture was stirred at room temperature for 1 hour. LCMS showed 1 was consumed completely. The reaction mixture was quenched by NaHCO₃ and extraction with DCM, washed with water and brine then dried over by anhydrous Na₂SO₄. Then the solution was concentrated under reduced pressure to give crude 2 (30.0 g) as solid which was used directly for the next step. ESI-LCMS: m/z 828.2 [M−H]⁻.

[0301] Preparation of (3): To a solution of 2 (29.5 g, 35.1 mmol) was dissolved 6% of DCA in DCM (300 mL) was added TES (6.2 g, 32.5 mmol) at r.t. The mixture was stirred at rt. for 10-20 min. LCMS and TLC show 2 was completely consumed. The reaction was quenched by the addition of NaHCO₃ (aq.). The resulting mixture was extracted with DCM. And the organic phase was washed with water and saturated brine and dried over by Na₂SO₄. Then the solution was concentrated under reduced pressure. The residue was purified by silica gel column chromatograph (eluent, PE/EA=3:1˜1:2). This resulted in giving 3 (16.0 g, 30.0 mmol, 85.0% yield) as a white solid. ESI-LCMS: m/z 562.1 [M−H]⁻; ¹H NMR (400 MHZ, DMSO-d₆) δ 11.25 (s, 1H), 8.77 (d, J=9.6 Hz, 2H), 8.09-8.01 (m, 2H), 7.70-7.61 (m, 1H), 7.56 (dd, J=8.2, 6.8 Hz, 2H), 6.14 (d, J=6.9 Hz, 1H), 5.47 (dd, J=5.1, 2.4 Hz, 1H), 5.35 (t, J=5.7 Hz, 1H), 4.94 (dd, J=7.0, 5.2 Hz, 1H), 4.19 (td, J=3.9, 2.3 Hz, 1H), 3.76-3.58 (m, 2H), 3.54 (td, J=4.5, 1.3 Hz, 2H), 3.32-3.22 (m, 2H), 3.03 (s, 3H), 2.79 (dd, J=7.2, 5.7 Hz, 2H), 2.61 (ddd, J=8.1, 5.8, 1.7 Hz, 2H), 2.15 (s, 3H).

[0302] Preparation of (4): To a solution of 3 (10.0 g, 18.9 mmol) and 3a (18.3 g, 20.0 mmol) in ACN (180 mL) was added molecular sieve and was stirred at room temperature for 15 min. Then the mixture was added BTT (0.3 M, 94 mL) and stirred at room temperature for 0.5 hour. LCMS showed 3 was consumed completely. The mixture used for directly.

[0303] Preparation of (5S&5R): The mixture 4 was added pyridine and xanthane hydride (5.7 g, 37.9 mmol) then was stirred at room temperature for 15 minutes. After filtering, the mixture was extracted with EA, washed with water and brine then dried over by anhydrous Na₂SO₄. The mixture was concentrated to give the crude 5S&5R (17.5 g, 12.8 mmol, S/R=44:55 by PNMR). The mixture is used directly. ESI-LCMS: m/z 1378.2 [M−H]^{+ 31}P-NMR (400 MHZ, DMSO-d6): δ 67.01, 66.80.

[0304] Preparation of (6S&6R): To a solution of 5 (17.0 g, 12.3 mmol) in ACN (170 mL) was added N₂H₄ (0.5M, 62 mL) at 0° C. The reaction was stirred at 0° C. for 0.5 hours. LCMS showed 5S&5R was consumed completely. The reaction mixture was quenched by 2,4-pentanedione at 0° C. for 15 minutes and extraction with EA. Then washed the organic phase once with saturated brine and dried over by Na₂SO₄. Then the solution was concentrated under reduced pressure. The residue was purified by Flash-Prep-HPLC with the following conditions (IntelFlash-1): Column, C18 silica gel; mobile phase, CH₃CN/H₂O (0.5% NH₄HCO₃)=2/3 increasing to CH₃CN/H₂O (0.5% NH₄HCO₃)=1/0 within 25 min, the eluted product was collected at CH₃CN/H₂O (0.5% NH₄HCO₃)=3/1; Detector, UV 254 nm. The residue was purified by SFC. This resulted in 6R (3.1 g, 2.4 mmol, 97.8% purity), and 6S (3.2 g, 2.4 mmol, 97.8% purity) as a white solid. 6R: ESI-LCMS: m/z 1282.3 [M+H]+; ¹H NMR (400 MHZ, DMSO-d₆) δ 12.86 (s, 1H), 8.25-7.95 (m, 4H), 7.76 (s, 1H), 7.68-7.46 (m, 6H), 7.46-7.38 (m, 2H), 7.36-7.25 (m, 7H), 6.95-6.84 (m, 4H), 6.17 (d, J=5.2 Hz, 1H), 5.91 (d, J=5.3 Hz, 1H), 5.46 (s, 1H), 5.20 (dt, J=10.0, 4.7 Hz, 1H), 4.67 (t, J=5.2 Hz, 1H), 4.45 (dd, J=10.1, 5.4 Hz, 2H), 4.38-4.10 (m, 6H), 3.93-3.57 (m, 11H), 3.45 (dt, J=25.0, 4.3 Hz, 5H), 3.19 (s, 3H), 3.14 (s, 3H), 1.57 (s, 3H). ³¹P NMR: δ 66.96.

[0305] 6S: ESI-LCMS: m/z 1282.3 [M+H]+; ¹H NMR (400 MHZ, DMSO-d₆) δ 12.83 (s, 1H), 8.76 (s, 1H), 8.65 (s, 1H), 8.16 (d, J=7.5 Hz, 2H), 8.10-8.00 (m, 2H), 7.74 (s, 1H), 7.67-7.46 (m, 6H), 7.41 (dt, J=6.8, 1.3 Hz, 2H), 7.34-7.24 (m, 7H), 7.03-6.79 (m, 4H), 6.18 (d, J=5.3 Hz, 1H), 5.93 (d, J=5.8 Hz, 1H), 5.47 (d, J=5.8 Hz, 1H), 5.21 (dt, J=9.6, 4.4 Hz, 1H), 4.69 (t, J=5.2 Hz, 1H), 4.54-4.38 (m, 3H), 4.38-4.05 (m, 5H), 3.84-3.60 (m, 10H), 3.40 (dt, J=18.3, 4.6 Hz, 5H), 1.59 (s, 3H). ³¹P NMR: δ 66.80.

### Example 14: Preparation of Example 14 Dimer from Intermediate 6S & 6R

[chemical structure]

[0306] Preparation of Example 14 Dimer: To a solution of 6S (3.0 g, 2.3 mmol) in DCM (30 mL) was added DCI (235 mg, 1.9 mmol) and CEP[N(iPr)₂]₂ (845 mg, 2.8 mmol) under N₂. The mixture was stirred at 25° C. for 2.5 h. LCMS showed 6S was consumed completely. The product was extracted with DCM. The organic layer was washed with H₂O and brine. Then the solution was concentrated under reduced pressure and the residue was purified by Flash-Prep-HPLC with the following conditions (IntelFlash-1): Column, C18 silica gel; mobile phase, CH₃CN/H₂O (0.5% NH₄HCO₃)=1/3 increasing to CH₃CN/H₂O (0.5% NH₄HCO₃)=1/0 within 25 min, the eluted product was collected at CH₃CN/H₂O (0.5% NH₄HCO₃)=1/0; Detector, UV 254 nm. This resulted in Example 14 dimer (2.0 g, 1.3 mmol, 56% yield) as a white solid. ESI-LCMS: m/z 1483.3 [M+2H]⁺; ¹H NMR (600 MHZ, DMSO-d₆) δ 12.78 (s, 1H), 11.18 (s, 1H), 8.56 (d, J=2.4 Hz, 2H), 8.17-7.91 (m, 4H), 7.71-7.37 (m, 7H), 7.38-7.10 (m, 9H), 6.81 (dd, J=8.8, 3.2 Hz, 4H), 6.09 (dd, J=13.6, 5.4 Hz, 1H), 5.96-5.69 (m, 1H), 5.13 (dq, J=10.7, 5.5, 4.4 Hz, 1H), 4.90-4.61 (m, 2H), 4.51-4.07 (m, 7H), 3.88-3.50 (m, 14H), 3.46-3.28 (m, 4H), 3.20 (dd, J=12.4, 9.6 Hz, 1H), 3.15-2.97 (m, 6H), 2.93-2.63 (m, 4H), 1.49 (d, J=4.6 Hz, 3H), 1.11 (dd, J=13.1, 6.7 Hz, 12H). ³¹P NMR (400 MHZ, DMSO-d₆): δ 149.69, 149.29, 67.06, 66.99.

### Example 15: Preparation of Example 15 Dimer from Intermediate 6R

[chemical structure]

[0307] Preparation of Example 15 Dimer: To a solution of 6R (3.0 g, 2.3 mmol) in DCM (30 mL) was added DCI (235 mg, 1.9 mmol) and CEP[N(iPr)₂]₂ (845 mg, 2.8 mmol) under N₂. The mixture was stirred at 25° C. for 2.5 h. LCMS showed 6R was consumed completely. The product was extracted with DCM. The organic layer was washed with H₂O and brine. Then the solution was concentrated under reduced pressure and the residue was purified by Flash-Prep-HPLC with the following conditions (IntelFlash-1): Column, C18 silica gel; mobile phase, CH₃CN/H₂O (0.5% NH₄HCO₃)=1/3 increasing to CH₃CN/H₂O (0.5% NH₄HCO₃)=1/0 within 25 min, the eluted product was collected at CH₃CN/H₂O (0.5% NH₄HCO₃)=1/0; Detector, UV 254 nm. This resulted in Example 15 dimer (2.0 g, 1.3 mmol, 56% yield) as a white solid. ESI-LCMS: m/z 1482.3 [M+H]⁺; ¹H NMR (400 MHZ, DMSO-d₆) δ 12.74 (s, 1H), 11.15 (s, 1H), 8.89-8.44 (m, 2H), 8.14-7.89 (m, 4H), 7.70-7.37 (m, 7H), 7.37-7.11 (m, 9H), 6.11 (dd, J=13.5, 5.5 Hz, 1H), 5.86 (d, J=6.6 Hz, 1H), 5.12 (s, 1H), 4.93-4.58 (m, 2H), 4.53-4.16 (m, 5H), 3.94-3.46 (m, 14H), 3.38-3.26 (m, 5H), 3.21 (d, J=2.7 Hz, 1H), 3.10-2.94 (m, 6H), 2.86-2.66 (m, 4H), 1.50 (s, 3H), 1.29-0.97 (m, 12H). ³¹P NMR (400 MHZ, DMSO-d₆): δ 149.87, 149.24, 66.95, 66.90.

### Example 16: Preparation of Key Intermediate 6S & 6R for Example 17 and 18 Dimers

[chemical structure]

[0308] Preparation of (2): To a solution of 1 (16.0 g, 21.3 mmol) in dioxane (160 mL) was added DCC (6.6 g, 32.0 mmol) and DMAP (3.2 g, 25.9 mmol). Then added Lev acid (3.6 g, 310.8 mmol) at 0° C. and the reaction mixture was stirred at room temperature for 1 hour. LCMS showed 1 was consumed completely. The reaction mixture was quenched by NaHCO₃ and extraction with DCM, washed with water and brine then dried over by anhydrous Na₂SO₄. Then the solution was concentrated under reduced pressure to give crude 2 (15.0 g) as solid which was used directly for the next step. ESI-LCMS: m/z 828.2 [M−H]⁻.

[0309] Preparation of (3): To a solution of 2 (14.7 g, 17.6 mmol) was dissolved 6% of DCA in DCM (150 mL) was added TES (3.1 g, 26.4 mmol) at r.t. The mixture was stirred at rt. for 10-20 min. LCMS and TLC show 2 was completely consumed. The reaction was quenched by the addition of NaHCO₃ (aq.). The resulting mixture was extracted with DCM. And the organic phase was washed with water and saturated brine and dried over by Na₂SO₄. Then the solution was concentrated under reduced pressure. The residue was purified by silica gel column chromatograph (eluent, PE/EA=3:1˜ 1:2). This resulted in giving 3 (8.0 g, 15.0 mmol, 85.0% yield) as a white solid. ESI-LCMS: m/z 562.1 [M−H]⁻; ¹H NMR (400 MHZ, DMSO-d₆) δ 11.25 (s, 1H), 8.77 (d, J=9.6 Hz, 2H), 8.09-8.01 (m, 2H), 7.70-7.61 (m, 1H), 7.56 (dd, J=8.2, 6.8 Hz, 2H), 6.14 (d, J=6.9 Hz, 1H), 5.47 (dd, J=5.1, 2.4 Hz, 1H), 5.35 (t, J=5.7 Hz, 1H), 4.94 (dd, J=7.0, 5.2 Hz, 1H), 4.19 (td, J=3.9, 2.3 Hz, 1H), 3.76-3.58 (m, 2H), 3.54 (td, J=4.5, 1.3 Hz, 2H), 3.32-3.22 (m, 2H), 3.03 (s, 3H), 2.79 (dd, J=7.2, 5.7 Hz, 2H), 2.61 (ddd, J=8.1, 5.8, 1.7 Hz, 2H), 2.15 (s, 3H).

[0310] Preparation of (4): To a solution of 3 (7.9 g, 15.0 mmol) and 3a (12.4 g, 13.6 mmol) in ACN (420 mL) was added molecular sieve and was stirred at room temperature for 15 min. Then the mixture was added BTT (0.3 M, 68 mL) and stirred at room temperature for 0.5 hour. LCMS showed 3 was consumed completely. The mixture is used directly.

[0311] Preparation of (5R&5S): The mixture 4 was added pyridine and xanthane hydride (3.0 g, 20.4 mmol) then was stirred at room temperature for 15 minutes. After filtering, the mixture was extracted with EA, washed with water and brine then dried over by anhydrous Na₂SO₄. The mixture was concentrated to give the crude 5S&5R (15.0 g, 11.1 mmol, S/R=49:50 by PNMR). The mixture is used directly. ESI-LCMS: m/z 1355.2 [M−H]^{+ 31}P-NMR (400 MHZ, DMSO-d6): δ 67.12, 66.80.

[0312] Preparation of (6): To a solution of 5 (15.0 g, 10.9 mmol) in ACN (150 mL) was added N₂H₄ (0.5M, 55 mL) at 0° C. The reaction was stirred at 0° C. for 0.5 hours. LCMS showed 5S&5R was consumed completely. The reaction mixture was quenched by 2,4-pentanedione at 0° C. for 15 minutes and extraction with EA. Then washed the organic phase once with saturated brine and dried over by Na₂SO₄. Then the solution was concentrated under reduced pressure. The residue was purified by Flash-Prep-HPLC with the following conditions (IntelFlash-1): Column, C18 silica gel; mobile phase, CH₃CN/H₂O (0.5% NH₄HCO₃)=2/3 increasing to CH₃CN/H₂O (0.5% NH₄HCO₃)=1/0 within 25 min, the eluted product was collected at CH₃CN/H₂O (0.5% NH₄HCO₃)=2/1; Detector, UV 254 nm. The residue was purified by SFC. This resulted in 6R (3.0 g, 2.3 mmol,), and 6S (3.0 g, 2.3 mmol,) as a white solid. 6R: ESI-LCMS: m/z 1274.4 [M+H]⁺. ¹H NMR (400 MHZ, DMSO-d₆) δ:12.07 (s, 1H), 11.62 (s, 1H), 11.22 (s, 1H), 8.76 (s, 1H), 8.65 (s, 1H), 8.21-7.96 (m, 3H), 7.71-7.49 (m, 3H), 7.41-7.09 (m, 11H), 6.92-6.78 (m, 4H), 6.19 (d, J=5.1 Hz, 1H), 5.90 (d, J=7.6 Hz, 1H), 5.48 (dd, J=5.8, 1.6 Hz, 1H), 5.27-5.11 (m, 1H), 4.96-4.84 (m, 1H), 4.73-4.64 (m, 1H), 4.53-4.13 (m, 7H), 3.82-3.55 (m, 10H), 3.46-3.55 (m, 4H), 3.14 (s, 3H), 3.09 (s, 3H), 2.94-2.89 (m, 2H), 2.78-2.64 (m, 1H), 1.11 (d, J=6.8 Hz, 6H); ³¹P NMR (400 MHZ, DMSO-d₆): δ 67.22.

[0313] 6S: ESI-LCMS: m/z 1274.4 [M+H]⁺. ¹H NMR (400 MHZ, DMSO-d₆) δ:12.05 (s, 1H), 11.58 (s, 1H), 11.19 (s, 1H), 8.73 (s, 1H), 8.63 (s, 1H), 8.14-6.97 (m, 3H), 7.73-7.49 (m, 3H), 7.49-7.07 (m, 11H), 6.95-6.78 (m, 4H), 6.18 (d, J=5.1 Hz, 1H), 5.90 (d, J=7.6 Hz, 1H), 5.47 (dd, J=5.8, 1.6 Hz, 1H), 5.24-5.09 (m, 1H), 4.96-4.82 (m, 1H), 4.73-4.63 (m, 1H), 4.57-4.10 (m, 7H), 3.83-3.50 (m, 10H), 3.46-3.40 (m, 2H), 3.29-3.23 (m, 2H), 3.14 (s, 3H), 3.00 (s, 3H), 2.94-2.86 (m, 2H), 2.78-2.64 (m, 1H), 1.10 (d, J=6.8 Hz, 6H); ³¹P NMR (162 MHz, DMSO-d₆): δ 67.10.

### Example 17: Preparation of Example 17 Dimer from Intermediate 6S

[chemical structure]

[0314] Preparation of Example 17 Dimer: To a solution of 6S (3.0 g, 2.4 mmol) in DCM (24 mL) with an inert atmosphere of nitrogen was added CEP[N(IPr)₂]₂ (939 mg, 3.1 mmol) and DCI (241 mg, 2.1 mmol) in order at room temperature. The resulting solution was stirred for 1 hour at room temperature and diluted with 50 mL dichloromethane and washed with 2×50 mL of saturated aqueous sodium bicarbonate and 1×50 mL of saturated aqueous sodium chloride respectively. The organic phase was dried over anhydrous sodium sulfate, filtered and concentrated till no residual solvent left under reduced pressure. The residue was purified by Flash-Prep-HPLC with the following conditions (IntelFlash-1): Column, C18 silica gel; mobile phase, CH₃CN/H₂O (0.5% NH₄HCO₃)=1/1 increasing to CH₃CN/H₂O (0.5% NH₄HCO₃)=1/0 within 20 min, the eluted product was collected at CH₃CN/H₂O (0.5% NH₄HCO₃)=9/1; Detector, UV 254 nm. This resulted in Example 17 dimer (2.0 g, 1.3 mmol, 56.5% yield) as white solid. ESI-LCMS: m/z 1474.3 [M+H]⁺; ¹H-NMR (400 MHZ, DMSO-d₆): δ 12.06 (s, 1H), 11.59 (s, 1H), 11.21 (s, 1H), 8.83-8.58 (m, 2H), 8.15-7.96 (m, 3H), 7.73-7.61 (m, 1H), 7.55 (t, J=7.6 Hz, 2H), 7.42-7.12 (m, 9H), 6.92-6.81 (m, 4H), 6.20 (dd, J=13.1, 5.1 Hz, 1H), 5.88 (dd, J=7.8, 1.9 Hz, 1H), 5.16 (dt, J=10.3, 4.7 Hz, 1H), 4.88 (dt, J=10.0, 5.2 Hz, 2H), 4.84-4.66 (m, 1H), 4.50 (dd, J=18.6, 7.8 Hz, 4H), 3.95-3.49 (m, 14H), 3.40 (dt, J=9.3, 4.6 Hz, 2H), 3.33 (s, 2H), 3.28-3.15 (m, 3H), 3.12 (d, J=3.3 Hz, 3H), 3.00 (d, J=4.4 Hz, 3H), 2.89 (td, J=7.1, 5.3 Hz, 2H), 2.84-2.78 (m, 2H), 2.72 (p, J=6.9 Hz, 1H), 1.19 (dt, J=10.7, 6.6 Hz, 12H), 1.10 (d, J=6.8 Hz, 6H); ³¹P NMR (400 MHZ, DMSO-d₆): δ 149.74, 149.33, 67.19.

### Example 18: Preparation of Example 18 Dimer from Intermediate 6R

[chemical structure]

[0315] Preparation of Example 18 Dimer: To a solution of 6R (3.0 g, 2.4 mmol) in DCM (24 mL) with an inert atmosphere of nitrogen was added CEP[N(iPr)₂]₂ (939 mg, 3.1 mmol) and DCI (241 mg, 2.1 mmol) in order at room temperature. The resulting solution was stirred for 1 hour at room temperature and diluted with 50 mL dichloromethane and washed with 2×50 mL of saturated aqueous sodium bicarbonate and 1×50 mL of saturated aqueous sodium chloride respectively. The organic phase was dried over anhydrous sodium sulfate, filtered and concentrated till no residual solvent left under reduced pressure. The residue was purified by Flash-Prep-HPLC with the following conditions (IntelFlash-1): Column, C18 silica gel; mobile phase, CH₃CN/H₂O (0.5% NH₄HCO₃)=1/1 increasing to CH₃CN/H₂O (0.5% NH₄HCO₃)=1/0 within 20 min, the eluted product was collected at CH₃CN/H₂O (0.5% NH₄HCO₃)=9/1; Detector, UV 254 nm. This resulted in Example 18 dimer (2.0 g, 1.3 mmol, 56.5% yield) as white solid. ESI-LCMS: m/z 1474.3 [M+H]⁺; ¹H NMR (400 MHZ, DMSO-d₆) δ 12.07 (s, 1H), 11.60 (s, 1H), 11.24 (s, 1H), 8.76 (s, 1H), 8.68 (d, J=1.9 Hz, 1H), 8.27-7.94 (m, 3H), 7.70-7.61 (m, 1H), 7.55 (t, J=7.6 Hz, 2H), 7.41-7.15 (m, 9H), 6.84 (ddt, J=9.5, 5.3, 2.1 Hz, 4H), 6.21 (dd, J=13.5, 5.3 Hz, 1H), 5.90 (dd, J=7.7, 1.7 Hz, 1H), 5.28-5.03 (m, 1H), 4.95-4.87 (m, 2H), 4.78 (dq, J=9.7, 5.1, 4.4 Hz, 1H), 4.48-4.09 (m, 6H), 3.99-3.52 (m, 14H), 3.47-3.29 (m, 6H), 3.22 (dt, J=10.0, 4.3 Hz, 1H), 3.18-3.02 (m, 6H), 2.89 (td, J=5.9, 3.0 Hz, 2H), 2.82-2.62 (m, 2H), 1.26-1.14 (m, 12H), 1.13-1.07 (m, 6H); ³¹P NMR (400 MHZ, DMSO-d₆): δ 149.55, 149.35, 67.40, 67.33.

### Example 19: Preparation of Key Intermediate 6S & 6R for Example 20 and 21 Dimers

[chemical structure]

[chemical structure]

[0316] Preparation of (2): To a solution of 1 (32.0 g, 22.6 mmol) in dioxane (320 mL) was added DCC (13.2 g, 64.0 mmol) and DMAP (6.3 g, 51.8 mmol). Then added Lev acid (7.2 g, 621.0 mmol) at 0° C. and the reaction mixture was stirred at room temperature for 1 hour. LCMS showed 1 was consumed completely. The reaction mixture was quenched by NaHCO₃ and extraction with DCM, washed with water and brine then dried over by anhydrous Na₂SO₄. Then the solution was concentrated under reduced pressure to give crude 2 (30.0 g) as solid which was used directly for the next step. ESI-LCMS: m/z 828.2 [M−H]⁻.

[0317] Preparation of (3): To a solution of 2 (29.5 g, 35.1 mmol) was dissolved 6% of DCA in DCM (300 mL) was added TES (6.2 g, 32.5 mmol) at r.t. The mixture was stirred at rt. for 10-20 min. LCMS and TLC show 2 was completely consumed. The reaction was quenched by the addition of NaHCO₃ (aq.). The resulting mixture was extracted with DCM. And the organic phase was washed with water and saturated brine and dried over by Na₂SO₄. Then the solution was concentrated under reduced pressure. The residue was purified by silica gel column chromatograph (eluent, PE/EA=3:1˜1:2). This resulted in giving 3 (16.0 g, 30.0 mmol, 85.0% yield) as a white solid. ESI-LCMS: m/z 562.1 [M−H]⁻; ¹H NMR (400 MHZ, DMSO-d₆) δ 11.25 (s, 1H), 8.77 (d, J=9.6 Hz, 2H), 8.09-8.01 (m, 2H), 7.70-7.61 (m, 1H), 7.56 (dd, J=8.2, 6.8 Hz, 2H), 6.14 (d, J=6.9 Hz, 1H), 5.47 (dd, J=5.1, 2.4 Hz, 1H), 5.35 (t, J=5.7 Hz, 1H), 4.94 (dd, J=7.0, 5.2 Hz, 1H), 4.19 (td, J=3.9, 2.3 Hz, 1H), 3.76-3.58 (m, 2H), 3.54 (td, J=4.5, 1.3 Hz, 2H), 3.32-3.22 (m, 2H), 3.03 (s, 3H), 2.79 (dd, J=7.2, 5.7 Hz, 2H), 2.61 (ddd, J=8.1, 5.8, 1.7 Hz, 2H), 2.15 (s, 3H).

[0318] Preparation of (4): To a solution of 3 (10.0 g, 18.9 mmol) and 3a (17.1 g, 20.0 mmol) in ACN (180 mL) was added molecular sieve and was stirred at room temperature for 15 min. Then the mixture was added BTT (0.3 M, 94 mL) and stirred at room temperature for 0.5 hour. LCMS showed 3 was consumed completely. The mixture used for directly.

[0319] Preparation of (5S&5R): The mixture 4 was added pyridine and xanthane hydride (5.7 g, 37.9 mmol) then was stirred at room temperature for 15 minutes. After filter, the mixture was extracted with EA, washed with water and brine then dried over by anhydrous Na₂SO₄. The mixture was concentrated to give the mixture 5S&5R (16.0 g, 12.1 mmol, S/R=40:55 by SFC). The mixture used for directly. ESI-LCMS: m/z 1315.2 [M−H]^{+ 31}P-NMR (400 MHZ, DMSO-d6): δ 66.44.

[0320] Preparation of (6): To a solution of 5 (16.0 g, 12.1 mmol) in ACN (160 mL) was added N₂H₄ (0.5M, 62 mL) at 0° C. The reaction was stirred at 0° C. for 0.5 hour. LCMS showed 5S&5R was consumed completely. The reaction mixture was quenched by 2,4-pentanedione at 0° C. for 15 minutes and extraction with EA. Then washed the organic phase once with saturated brine and dried over by Na₂SO₄. Then the solution was concentrated under reduced pressure. The residue was purified by Flash-Prep-HPLC with the following conditions (IntelFlash-1): Column, C18 silica gel; mobile phase, CH₃CN/H₂O (0.5% NH₄HCO₃)=2/3 increasing to CH₃CN/H₂O (0.5% NH₄HCO₃)=1/0 within 25 min, the eluted product was collected at CH₃CN/H₂O (0.5% NH₄HCO₃)=3/1; Detector, UV 254 nm. The residue was purified by SFC. This resulted in 6R (3.0 g, 2.4 mmol), and 6S (3.2 g, 2.5 mmol,) as a white solid. 6R: ESI-LCMS: m/z 12182.3 [M+H]+; ¹H NMR (400 MHz, DMSO-d₆) δ 11.20 (s, 2H), 8.81-8.44 (m, 4H), 8.16-7.92 (m, 4H), 7.64 (tt, J=6.6, 3.3 Hz, 2H), 7.55 (dd, J=7.8, 6.4 Hz, 4H), 7.42-7.33 (m, 2H), 7.30-7.19 (m, 9H), 6.88-6.75 (m, 4H), 6.48 (t, J=7.0 Hz, 1H), 6.17 (d, J=5.1 Hz, 1H), 5.35 (dd, J=9.1, 5.6 Hz, 2H), 4.70 (t, J=5.1 Hz, 1H), 4.56-4.26 (m, 4H), 4.19 (ddt, J=19.0, 10.2, 4.6 Hz, 3H), 3.83-3.58 (m, 8H), 3.50-3.16 (m, 6H), 2.89 (t, J=5.9 Hz, 2H), 2.64 (ddd, J=14.3, 6.5, 2.4 Hz, 1H). ³¹P NMR: (400 MHZ, DMSO-d₆): δ 66.41.

[0321] 6S: ESI-LCMS: m/z 1218.2 [M+H]+; ¹H NMR (400 MHZ, DMSO-d₆) δ 11.22 (s, 2H), 8.90-8.47 (m, 4H), 8.13-7.95 (m, 4H), 7.73-7.49 (m, 6H), 7.44-7.31 (m, 2H), 7.30-7.20 (m, 9H), 6.88-6.75 (m, 4H), 6.51 (t, J=7.0 Hz, 1H), 6.21 (d, J=5.2 Hz, 1H), 5.45 (d, J=33.2 Hz, 2H), 4.70 (t, J=5.1 Hz, 1H), 4.48 (s, 1H), 4.21 (dt, J=9.2, 5.7 Hz, 3H), 3.83-3.57 (m, 8H), 3.48-3.19 (m, 6H), 2.90 (t, J=5.9 Hz, 2H), 2.80-2.62 (m, 1H). ³¹P NMR: (400 MHZ, DMSO-d₆): δ 66.44.

### Example 20: Preparation of Example 20 Dimer from Intermediate 6S

[chemical structure]

[0322] Preparation of Example 20 Dimer: To a solution of 6S (3.2 g, 2.5 mmol) in DCM (30 mL) was added DCI (250 mg, 2.1 mmol) and CEP[N(iPr)₂]₂ (903 mg, 3.0 mmol) under N₂. The mixture was stirred at 25° C. for 2.5 h. LCMS showed 6S was consumed completely. The product was extracted with DCM, The organic layer was washed with H₂O and brine. Then the solution was concentrated under reduced pressure and the residue was purified by Flash-Prep-HPLC with the following conditions (IntelFlash-1): Column, C18 silica gel; mobile phase, CH₃CN/H₂O (0.5% NH₄HCO₃)=1/3 increasing to CH₃CN/H₂O (0.5% NH₄HCO₃)=1/0 within 25 min, the eluted product was collected at CH₃CN/H₂O (0.5% NH₄HCO₃)=1/0; Detector, UV 254 nm. This resulted in Example 20 dimer (2.0 g, 1.4 mmol, 56% yield) as a white solid. ESI-LCMS: m/z 1418.3 [M+H]⁻ 1H NMR (400 MHZ, DMSO-d6) δ 8.66 (d, J=1.6 Hz, 2H), 8.56 (dd, J=4.3, 3.3 Hz, 2H), 8.12-7.90 (m, 4H), 7.64 (tdd, J=6.8, 5.2, 2.6 Hz, 2H), 7.55 (td, J=8.0, 6.4 Hz, 4H), 7.45-7.31 (m, 2H), 7.28-7.13 (m, 7H), 6.88-6.66 (m, 4H), 6.47 (td, J=7.0, 3.4 Hz, 1H), 6.19 (dd, J=14.1, 5.3 Hz, 1H), 4.94 (dt, J=15.5, 5.1 Hz, 1H), 4.52-4.27 (m, 4H), 4.16 (ddq, J=8.5, 5.6, 2.8 Hz, 2H), 3.97-3.58 (m, 13H), 3.50-3.35 (m, 2H), 3.24 (ddd, J=20.5, 17.3, 10.3 Hz, 3H), 3.11 (d, J=3.2 Hz, 3H), 2.97-2.73 (m, 4H), 1.18 (ddd, J=12.4, 6.7, 2.2 Hz, 12H). ³¹P NMR: (400 MHZ, DMSO-d₆): δ 149.69, 149.17, 66.51, 66.48.

### Example 21: Preparation of Example 21 Dimer from Intermediate 6S

[chemical structure]

[0323] Preparation of Example 21 Dimer: To a solution of 6R (3.0 g, 2.3 mmol) in DCM (30 mL) was added DCI (235 mg, 1.9 mmol) and CEP[N(iPr)₂]₂ (845 mg, 2.8 mmol) under N₂. The mixture was stirred at 25° C. for 2.5 h. LCMS showed 6R was consumed completely. The product was extracted with DCM. The organic layer was washed with H₂O and brine. Then the solution was concentrated under reduced pressure and the residue was purified by Flash-Prep-HPLC with the following conditions (IntelFlash-1): Column, C18 silica gel; mobile phase, CH₃CN/H₂O (0.5% NH₄HCO₃)=1/3 increasing to CH₃CN/H₂O (0.5% NH₄HCO₃)=1/0 within 25 min, the eluted product was collected at CH₃CN/H₂O (0.5% NH₄HCO₃)=1/0; Detector, UV 254 nm. This resulted in Example 21 dimer (1.9 g, 1.3 mmol, 56% yield) as a white solid. ESI-LCMS: m/z 1418.3 [M−H]⁻; ¹H NMR (400 MHZ, DMSO-d₆) δ 11.14 (d, J=9.8 Hz, 2H), 8.69 (d, J=1.7 Hz, 2H), 8.49 (t, J=2.8 Hz, 2H), 8.04-7.84 (m, 4H), 7.57 (tdt, J=6.2, 3.0, 1.4 Hz, 2H), 7.53-7.40 (m, 4H), 7.35-7.23 (m, 2H), 7.22-7.05 (m, 7H), 6.82-6.63 (m, 4H), 6.14 (dd, J=12.7, 5.4 Hz, 1H), 5.57-5.11 (m, 1H), 4.86 (dt, J=17.2, 5.2 Hz, 1H), 4.79-4.67 (m, 1H), 4.46-4.18 (m, 4H), 4.13 (ddp, J=9.0, 6.1, 3.0 Hz, 2H), 3.90-3.51 (m, 13H), 3.33 (dt, J=9.5, 4.7 Hz, 2H), 3.26-3.11 (m, 3H), 3.04 (d, J=3.6 Hz, 3H), 2.82 (t, J=5.8 Hz, 2H), 2.74 (tt, J=6.2, 2.2 Hz, 2H), 1.26-1.00 (m, 13H). ³¹P NMR: (400 MHz, DMSO-d₆): δ 149.70, 149.367, 66.51, 66.44.

### Example 22: Comparison of ASO-6 and ASO-139 with Control ASO-1

[0324] In order to identify additional antisense oligonucleotides (ASOs), ASO-6 and ASO-139 were compared to the ASO control, ASO-1.

[0325] The efficacy of ASO-6 and ASO-139 to activate RNase H-mediated degradation of the target HBV RNA was determined by performing the EC₅₀ assay as described in Example 2. The EC₅₀ assay as described was used to determine the concentration of ASO required to reduce the transcript levels by 50% in relation to an untreated cell control. Any changes less than two- to three-fold difference from the control ASO was considered similar to the RNase H activation seen utilizing the control ASO-1. ASO-6 and ASO-139 exhibited a reduction in EC₅₀ value as compared to ASO-1, however, the reduction for ASO-139 was approximately 5-fold more than for ASO-6 (Table 5).

[0326] The ability of ASO-6 and ASO-139 to trigger cell death was determined as described in Example 2. The CC₅₀ was used to determine the concentration of the ASO as compared to the ASO-1 control to reduce the cell population by 50%, with an increased CC₅₀ as compared to the control representing a decreased cytotoxicity. ASO-6 and ASO-139 had a CC₅₀ comparable to the ASO-1 control and have the same level of toxicity (Table 5).

[0327] To assess ASO-6 and ASO-139 ability to reduce HBV infections in cells the TLR8 assay as described in Example 2 was used to evaluate activation of the TLR8 pathway. ASO-6 and ASO-139 values were normalized to the level of TLR8 activation of the ASO-1. ASO-6 increased activation of TLR8 and ASO-139 decreased activation (Table 5).

[0328] To determine if ASO-6 and ASO-139 activated cell death mechanisms when transfected into cells, the caspase assay as described in Example 2 was performed. The values of ASO-6 and ASO-139 were normalized to the level of caspase activity detected with the control ASO-1, with ASO-6 having lower caspase levels compared to the ASO-1 control and ASO-139 having higher level of caspases comparing with ASO-1 (Table 5).

[0329] The effect of the ASO-1, ASO-6, and ASO-139 on the body weight of AAV-HBV infected hTLR8 KI mice was determined. Mice were evaluated for percentage body weight change. Group 1 (control) were injected with PBS, Group 3 with 50 mg/kg of ASO-1, Group 9 with 50 mg/kg of AS0-139, and Group 5 with 50 mg/kg of ASO-6 once a day on days 0, 3, 7, 14, and 21. Mice in Group 5 that were treated with ASO-6 tolerated treatment better than Group 3 (ASO-1) and Group 9 (ASO-139) (FIG. 2). ASO-6 had no body weight loss comparing with vehicle control group at the end of the study.

TABLE 5
Assay Results for ASO-1, ASO-6, and ASO-139

| | EC50 | CC50 | hTLR8 Fold vs. | Caspase Activity: Fold vs. |
|---|---|---|---|---|
| ASO | (nM) | (nM) | ASO-1 | ASO-1 at 167 nM |
| ASO-6 | 5.8 | >167 | 1.5 | 0.86 |
| ASO-1 | 8.6 | >167 | 1.0 | 1.0 |
| ASO-139 | 1.8 | >167 | 0.8 | 1.9 |

### Example 23: 5′ Mono GalNAc ASO Improves Liver/Kidney Ratio

[0330] To assess the effects of GalNAc conjugate a mono GalNAc-4 was attached to ASO-6 5′ to create ASO-651 (FIG. 3A). To assess the uptake of both ASO-6 and ASO-651 in macrophages, the concentrations of ASO-651 and ASO-6 (metabolite of ASO-651) were determined in blood monocyte differentiated M1 macrophages. Results demonstrated that there was a gradual uptake of both ASO-6 and ASO-651, with removal of GalNAc occurring in macrophages being time dependent. (FIG. 3B). The ability of ASO-6 and ASO-651 to activate human TLR8 receptor in HEK-Blue hTLR8 cells was assessed as described in Example 2 at differing concentrations. The hTLR8 activity was comparable between ASO-6 and ASO-651 (FIG. 3C). The effects of 5′ Mono GalNAc (ASO-651) in delivering active drug (metabolite ASO-6) to two major organs (liver and Kidney) was studied in AAV-HBV infected hTLR8 knock in mice and uninfected human TLR8 knock in mice 4 hours post single 40 mg/kg dose. 5′ mono GalNAc improved the liver/kidney ration in the range of 22% to 350% comparing with unconjugated ASO (ASO-6). (FIG. 4A-4B). For pharmacodynamic effects, the IL-12 p40 profile was also assessed in uninfected hTLR8 knock in mice. 5′mono GalNAc (ASO-651) achieved the same IL-12 p40 induction as the unconjugated ASO (ASO-6) (FIG. 4C).

### Example 24: ASOs with Locked Nucleic Acid LNA Modification and No LNA Modification

[0331] ASOs with LNA modifications and no LNA modifications were prepared based on the parent modification, ASO-6. ASO-182 contains LNA modifications at positions 3 and 18, ASO-222 contains LNA modifications at positions 16, 18, and 20, ASO-114 and ASO-153 that contain no LNA modifications.

[0332] ASO-182, ASO-222, ASO-114 and ASO-153 were subjected to the assays described in Example 2 to determine RNAse H-mediated degradation, cytotoxicity, TLR8 pathway activation, and caspase activation (Table 6-9) and compared to control ASO-1.

[0333] The effect of LNA modified ASO's, ASO-182 and ASO-222, on HBsAg and Terminal Human ALT1 was evaluated in HBV infected PXB mice. Mice were injected with 50 mg/kg per dose of PBS or ASO over a time course of 28 days as depicted in FIG. 5. Group 1 received PBS, Group 3 received ASO-1, Group 11 received ASO-182, and Group 13 received ASO-222. Serum HBsAg and hALT levels were measured at various time points. Results demonstrate the ASO-182 was more potent than ASO-1 control via decreased HBsAg levels and higher hALT levels. ASO-222 had similar potency levels compared the ASO-1 control based on similar HBsAg levels yet had slightly less effect on hALT levels. (FIG. 5).

[0334] The effect of ASO-1, ASO-139, ASO-6, ASO-114, ASO-153, ASO-182, ASO-222, on liver cytokine proteins was determined in AAV-HBV hTLR8 knock in mice. Mice were treated with a single dose of 40 mg/kg of either ASO-1, ASO-139, ASO-6, ASO-114, ASO-153, ASO-182, or ASO-222, with a n of 3 per treatment group. IL-12 p40, IP-10, IL-18, and TNG-alpha protein levels were tested after treatment (FIG. 6).

TABLE 6
Assay Results for ASO-1 and ASO-182

| | | | | | Caspase | Caspase |
|---|---|---|---|---|---|---|
| | | | | | Activity: Fold | Activity: Fold |
| | LNA | EC50 | CC50 | hTLR8 Fold | vs. ASO-1 at | vs. ASO-1 at |
| ASO | Modification | (nM) | (nM) | vs. ASO-1 | 167 nM | 56 nM |
| ASO-182 | Pos 3 and 18 | 3.3 | >500 | 1.52 | 1.2 | 1.1 |
| ASO-1 | | 10.95 | >500 | 1.0 | 1.0 | 1.0 |

TABLE 7
Assay Results for ASO-1 and ASO-222

| | | | | | Caspase | Caspase |
|---|---|---|---|---|---|---|
| | | | | | Activity: Fold | Activity: Fold |
| | LNA | HepG2.2.15 | HepG2.2.15 | hTLR8 Fold | vs. ASO-1 at | vs. ASO-1 at |
| ASO | Modification | EC50 (nM) | CC50 (nM) | vs. ASO-1 | 167 nM | 56 nM |
| ASO-222 | Pos 16, 18, and 20 | 1.233 | >500 | 1.5 | 1.0 | 1.2 |
| ASO-1 | | 6.001 | 217.9 | 1.0 | 1.0 | 1.0 |

TABLE 8
Assay Results for ASO-1 and ASO-114

| | | | | | Caspase | Caspase |
|---|---|---|---|---|---|---|
| | | | | | Activity: Fold | Activity: Fold |
| | LNA | HepG2.2.15 | HepG2.2.15 | hTLR8 Fold | vs. ASO-1 at | vs. ASO-1 at |
| ASO | Modification | EC50 (nM) | CC50 (nM) | vs. ASO-1 | 167 nM | 56 nM |
| ASO-114 | None | 5.767 | >500 | 1.5 | 0.87 | 0.71 |
| ASO-1 | | 6.001 | 217.9 | 1.0 | 1.0 | 1.0 |

TABLE 9
Assay Results for ASO-1 and ASO-153.

| | | | | | Caspase |
|---|---|---|---|---|---|
| | OMe | HepG2.2.15 | HepG2.2.15 | hTLR8 Fold | Activity: Fold |
| ASO | Modification | EC50 (nM) | CC50 (nM) | vs. ASO-1 | vs. ASO-1 |
| ASO-153 | OMe_Pos- | 10.39 | >500 | 1.73 | 1.1 |
| | 16, 18 & 20 | | | | |
| ASO-1 | | 8.6 | >167 | 1 | 1 |

### Example 25: ASOs Two LNA Walk Set Based on ASO-6

[0335] The ASO-6 parental ASO was selected as the starting sequence for preparing a set of ASO with two LNA walk modification to identify better patterns on ASO-6. An exemplary method for creating two LNA walk modifications is disclosed in FIG. 7. ASO-545, ASO-546, ASO-547, ASO-548, ASO-549, ASO-550, ASO-551, ASO-552, ASO-553, ASO-554, ASO-555, ASO-556, ASO-557, ASO-558, ASO-559, ASO-560, ASO-561, and ASO-578 was prepared and subjected to the assays described in Example 2 to determine RNAse H-mediated degradation, cytotoxicity, TLR8 pathway activation, and caspase activation as compared to control ASO-1 (Table 10).

[0336] The effect of LNA modified ASO's, ASO-555, ASO-556, and ASO-559, on HBsAg levels in plasma and HBeAg levels in plasma were evaluated in an AAV-HBV C57BL/6 mouse model. Mice were injected with 40 mg/kg ASOs on days 0, 3, 7, 10, 14, and 21. On days predose, 7, 14, 21 and 28, plasma was collected and tested for HBsAg, HBeAg, HBV DNA and ALT. On day 28, liver, kidney and plasma were also collected from each mouse (FIG. 8). Group 1 was injected with PBS, Group 2 with ASO-1 control, Group 3 with ASO-139 control, Group 4 with ASO-555, Group 5 with ASO-556, and Group 6 with ASO-559. ASO-555 and ASO-556 had similar reductions in HBeAg levels as ASO-1 and ASO-139 controls. For HBsAg, ASO-555 and ASO-556 had similar reductions as ASO-1, ASO-139 had deeper HBsAg knock down than the rest (FIG. 9).

[0337] The effect of ASO-1 (control), ASO-6 (control), ASO-555, and ASO-556 on liver cytokine proteins was determined in AAV-HBV hTLR8 knock in mice. Mice were treated with a single dose of 40 mg/kg of either PBS, ASO-1, ASO-6, ASO-555, or ASO-556, with a n of 3 per treatment group. IFN alpha, IFN beta, IL-12/IL23 p40, and TNF alpha protein levels were tested after treatment. Overall these ASOs had similar patterns of cytokine induction (FIG. 10).

TABLE 10
Assay Results for Two LNA walk set.

| | | Caspase | Caspase | | | |
|---|---|---|---|---|---|---|
| | | Activity: | Activity: | | | |
| | | Fold vs. | Fold vs. | | | |
| | LNA | ASO-1 at | ASO-1 at | hTLR8 Fold | HepG2.2.15 | HepG2.2.15 |
| ASO | Modification | 167 nM | 56 nM | vs. ASO-1 | EC50 (nM) | CC50 (nM) |
| ASO-545 | LNA Pos-1_2 | 1.38 | 0.73 | 1.29 | 4.32 | >167 |
| ASO-546 | LNA Pos-1_3 | 0.90 | 1.02 | 1.19 | 3.70 | >167 |
| ASO-547 | LNA Pos-1_4 | 0.85 | 1.18 | 1.05 | 4.06 | >167 |
| ASO-548 | LNA Pos-1_5 | 1.25 | 0.72 | 0.91 | 3.28 | >167 |
| ASO-549 | LNA Pos-1_16 | 1.10 | 1.13 | 1.11 | 4.51 | >167 |
| ASO-550 | LNA Pos-1_18 | 0.90 | 0.81 | 1.15 | 3.66 | >167 |
| ASO-551 | LNA Pos-1_20 | 1.13 | 0.77 | 1.04 | 3.48 | >167 |
| ASO-552 | LNA pos-2_3 | 1.11 | 0.92 | 1.49 | 3.35 | >167 |
| ASO-553 | LNA Pos-2_5 | 1.14 | 1.64 | 1.14 | 3.20 | >167 |
| ASO-554 | LNA Pos-2_16 | 0.87 | 1.29 | 1.43 | 4.40 | >167 |
| ASO-555 | LNA Pos-2_17 | 0.81 | 1.33 | 1.91 | 1.76 | >167 |
| ASO-556 | LNA Pos-2_18 | 0.64 | 0.90 | 1.98 | 3.07 | >167 |
| ASO-557 | LNA Pos-2_19 | 0.87 | 1.09 | 1.54 | 1.25 | >167 |
| ASO-558 | LNA Pos-3_4 | 1.41 | 1.41 | 0.93 | 3.42 | >167 |
| ASO-559 | LNA Pos-3_17 | 1.17 | 1.17 | 1.69 | 2.04 | >167 |
| ASO-560 | LNA Pos-3_19 | 0.81 | 1.23 | 1.60 | 2.84 | >167 |
| ASO-561 | LNA Pos-3_20 | 1.14 | 0.64 | 1.38 | 3.27 | >167 |
| ASO-1 | N/A | 1 | 1 | 1 | 3.4 | >167 |

### Example 26: ASOs Full LNA Walk Set Based on ASO-6

[0338] ASO-6 was selected as the starting sequence for preparing a set of ASOs with full LNA walk modifications, ASO-562, ASO-563, ASO-564, ASO-565, ASO-566, ASO-567, ASO-568, ASO-569, ASO-570, ASO-571, ASO-572, ASO-573, ASO-574, ASO-575, ASO-576, and ASO-577.

[0339] The ASOs were subjected to the assays described in Example 2 to determine RNAse H-mediated degradation, cytotoxicity, TLR8 pathway activation, and caspase activation as compared to control ASO-1 (Table 11).

TABLE 11
Assay Results for full LNA walk set.

| | | Caspase | Caspase | | | |
|---|---|---|---|---|---|---|
| | | Activity: | Activity: | | | |
| | | Fold vs. | Fold vs. | | | |
| | LNA | ASO-1 at | ASO-1 at | hTLR8 Fold | HepG2.2.15 | HepG2.2.15 |
| ASO | Modification | 167 nM | 56 nM | vs. ASO-1 | EC50 (nM) | CC50 (nM) |
| ASO-562 | LNA Pos-4_5 | 3.23 | 14.10 | 0.71 | 2.98 | >167 |
| ASO-563 | LNA Pos-4_16 | 2.34 | 6.30 | 0.90 | 3.43 | >167 |
| ASO-564 | LNA Pos-4_17 | 2.66 | 11.23 | 0.83 | 1.52 | 23.11 |
| ASO-565 | LNA Pos-4_18 | 2.13 | 5.45 | 0.95 | 2.64 | >167 |
| ASO-566 | LNA Pos-4_19 | 2.54 | 9.21 | 0.85 | 2.58 | >167 |
| ASO-567 | LNA Pos-5_17 | 2.90 | 13.27 | 0.67 | 1.21 | >167 |
| ASO-568 | LNA Pos-5_19 | 2.98 | 11.92 | 0.59 | 1.64 | >167 |
| ASO-569 | LNA Pos-5_20 | 2.89 | 10.73 | 0.80 | 2.33 | >167 |
| ASO-570 | LNA Pos-16_17 | 1.69 | 7.94 | 1.34 | 1.70 | >167 |
| ASO-571 | LNA Pos-16_19 | 1.64 | 5.44 | 1.09 | 1.83 | >167 |
| ASO-572 | LNA Pos-16_20 | 1.65 | 5.19 | 1.21 | 2.88 | >167 |
| ASO-573 | LNA Pos-17_18 | 1.83 | 6.18 | 1.16 | 1.43 | >167 |
| ASO-574 | LNA Pos-17_19 | 2.17 | 8.88 | 1.25 | 1.23 | >167 |
| ASO-575 | LNA Pos-17_20 | 1.95 | 8.12 | 1.39 | 1.27 | >167 |
| ASO-576 | LNA Pos-18_19 | 2.06 | 5.47 | 1.24 | 1.64 | >167 |
| ASO-577 | LNA Pos-18_20 | 1.78 | 4.31 | 1.29 | 1.77 | >167 |
| ASO-1 | N/A | N/A | N/A | N/A | 4.53 | >167 |
| ASO-6 | N/A | 0.85 | 0.30 | 1.13 | 8.37 | >167 |

### Example 27: ASOs Replacing LNA with GuNA

[0340] To assess the effect of GuNA, LNA in ASO-182 and ASO-222 was replaced with GuNA to create ASO-784, ASO-785, ASO-752, and ASO-831. Additional ASO's were created replacing single or double LNA from various parental constructs with GuNA to create ASO-712, ASO-713, ASO-714, and ASO-715. The ASOs were subjected to the assays described in Example 2 to determine RNAse H-mediated degradation, cytotoxicity, TLR8 pathway activation, and caspase activation as compared to control ASO-1 and/or ASO-6 (Table 12-13).

TABLE 12
Assay Results for ASOs with GuNA

| | Caspase Activity: | Caspase Activity: | | | |
|---|---|---|---|---|---|
| | Fold vs. ASO-1 at | Fold vs. ASO-1 at | hTLR8 Fold | HepG2.2.15 | HepG2.2.15 |
| ASO | 167 nM | 56 nM | vs. ASO-1 | EC50 (nM) | CC50 (nM) |
| ASO-784 | 1.70 | 3.61 | 1.37 | 1.67 | >167 |
| ASO-785 | 1.73 | 2.62 | 0.86 | 1.39 | >167 |
| ASO-752 | 1.75 | 3.45 | 0.90 | 1.55 | >167 |
| ASO-831 | 0.90 | 0.36 | 1.57 | 2.3 | >167 |
| ASO-222 | 1.58 | 2.66 | 1.02 | 2.29 | >167 |
| ASO-1 | 1 | 1 | 1 | 4.31 | >167 |

TABLE 13
Assay Results for ASOs with GuNA

| | | Caspase | Caspase | | | |
|---|---|---|---|---|---|---|
| | | Activity: Fold | Activity: Fold | hTLR8 | | |
| | GuNA | vs. ASO-1 at | vs. ASO-1 at | Fold vs. | HepG2.2.15 | HepG2.2.15 |
| ASO | Position | 167 nM | 56 nM | ASO-1 | EC50 (nM) | CC50 (nM) |
| ASO-712 | 17 | 2.21 | 3.11 | 0.87 | 8.03 | >167 |
| ASO-713 | 18 | 0.59 | 0.16 | 1.05 | 1.31 | >167 |
| ASO-714 | 19 | 0.69 | 0.43 | 1.00 | 2.35 | >167 |
| ASO-715 | 2, 19 | 1.65 | 0.92 | 1.24 | 3.37 | >167 |
| ASO-6 | N/A | N/A | N/A | 1.06 | 11.579 | >167 |
| ASO-1 | N/A | 1 | 1 | 1 | 10.33 | >167 |

[0341] The effect of ASO-713 and ASO-714 on HBsAg levels in plasma was tested in mice. Mice were injected with either PBS (Group 1) or 6×25 mg/kg ASOs including ASO-1 (Group 2), ASO-139 (Group 4), ASO-713 (Group 11), and ASO-714 (Group 12), on days 0, 3, 7, 10, 14, and 21, with ASO-713 and ASO-714 showing suboptimal potency in vivo potency as compared to ASO-1 and ASO-139 (FIG. 11)

### Example 28: ASOs 2′-OMe Abasic Monomer Walk Based on ASO-1

[0342] To assess the effect of 2′-OMe abasic monomer modifications in the gap regions, ASO-1 was used as the parental ASO and ASO-672, ASO-673, ASO-674, ASO-675, ASO-676, ASO-677, ASO-678, ASO-679, ASO-680, and ASO-681 were prepared (FIG. 12). The ASOs were subjected to the assays described in Example 2 to determine RNAse H-mediated degradation, cytotoxicity, TLR8 pathway activation, and caspase activation as compared to control ASO-1 (Table 14).

TABLE 14
Assay Results for ASOs with 2′OMe Abasic modification (mX)

| | | Caspase | Caspase | | | |
|---|---|---|---|---|---|---|
| | | Activity: Fold | Activity: Fold | hTLR8 | | |
| | | vs. ASO-1 at | vs. ASO-1 at | Fold vs. | HepG2.2.15 | HepG2.2.15 |
| ASO | Modification | 167 nM | 56 nM | ASO-1 | EC50 (nM) | CC50 (nM) |
| ASO-672 | mX 6 | 0.64 | 0.47 | 0.96 | 7.99 | >167 |
| ASO-673 | mX 7 | 0.58 | 0.52 | 1.01 | 15.2 | >167 |
| ASO-674 | mX 8 | 0.73 | 0.33 | 0.96 | 12.78 | >167 |
| ASO-675 | mX 9 | 0.82 | 0.41 | 0.81 | 21.65 | >167 |
| ASO-676 | mX 10 | 0.63 | 0.34 | 0.89 | 15.08 | >167 |
| ASO-677 | mX 11 | 0.58 | 0.34 | 0.95 | 9.2 | >167 |
| ASO-678 | mX 12 | 0.56 | 0.09 | 0.61 | 42.78 | >167 |
| ASO-679 | mX 13 | 0.59 | 0.24 | 0.75 | 22.19 | >167 |
| ASO-680 | mX 14 | 0.70 | 0.49 | 0.67 | 18.05 | >167 |
| ASO-681 | mX 15 | 0.95 | 0.53 | 0.61 | 23.76 | >167 |
| ASO-1 | N/A | 1 | 1 | 1 | 8.6 | >167 |
| ASO-139 | N/A | 1.9 | 1.36 | 0.8 | 1.8 | >167 |

[0343] The effect of ASO-672 and ASO-677 on HBsAg levels in plasma and HBeAg levels in plasma were evaluated in an AAV-HBV C57BL/6 mouse model as described in Example 25. Group 1 was injected with PBS, Group 2 with ASO-1 control, Group 3 with ASO-139 control, Group 7 with ASO-672 and Group 8 with ASO-677. The ASOs were dosed at 6×40 mg/kg on days 0, 3, 7, 10, 14, 21. ASO-677 has reductions in HBsAg and HBeAg levels deeper than ASO-1 control and comparable to ASO-139 control (FIG. 13). 2′ OMe abasic modification is at position #6 in ASO-672 and at position #11 in ASO-677 resulted similar in vitro potency (EC50 in HepG2.2.15 assay); however the in vivo potency of these ASOs was drastically different and unexpected. ASO-677 is more potent than ASO-1 with no 2′ OMe abasic monomer, and it knocks down HBsAg as much as ASO-139. ASO-672 on the other hand, is mostly inactive in vivo. Interestingly and unexpectedly, incorporating an abasic monomer at position #11, as in ASO-677, resulted in significantly improved liver exposure and liver-to-kidney ratio relative to reference ASOs: ASO-1 and ASO-139. For treating liver disease, ASO-677 has a more desirable PK profile than the reference ASOs ASO-1 and ASO-139.

[0344] The effect of remaining ASOs (ASO-673, ASO-674, ASO-675, ASO-676, ASO-678 and ASO-679 on HBsAg levels in plasma were evaluated in an AAV-HBV C57BL/6 mouse model as described in Example 25. Group 1 was injected with PBS, Group 2 with ASO-1 control, Group 3 with ASO-139 control, Group 11, 12, 13, 14, 15, 16 with ASO-673, ASO-674, ASO-675, ASO-676, ASO-678 and ASO-679 respectively. The ASOs were dosed at 6×25 mg/kg on days 0, 3, 7, 10, 14, 21. ASO-676 has reductions in HBsAg levels significantly deeper than ASO-1 control and slightly better than ASO-139 control (FIG. 14). The in vitro potency (HepG2.2.15 EC50) of ASO-673, ASO-674 and ASO-676 were quite similar, however ASO-673 and ASO-674 were mostly inactive in vivo while ASO-676 was the most potent ASO in this study, more potent than ASO-1 and ASO-139 controls. Interestingly, incorporating an abasic monomer at position #10, as in ASO-676, resulted in significantly improved liver exposure and liver-to-kidney ratio relative to reference ASOs: ASO-1 and ASO-139. This preferred PK profile which likely contributed to ASO-676's desired in vivo potency. For a drug treating liver disease, this PK profile of ASO-676 was better than those of ASO-1 and ASO-139.

### Example 29: ASOs Mismatch Walk in Gap Based on ASO-1

[0345] To assess the effect of mismatch in the gap regions, ASO-1 was used as the parental ASO and ASO-682, ASO-683, ASO-684, ASO-685, ASO-686, ASO-687, ASO-688, ASO-689, ASO-690, ASO-691, ASO-692, and ASO-693 were prepared. The ASOs were subjected to the assays described in Example 2 to determine RNAse H-mediated degradation, cytotoxicity, TLR8 pathway activation, and caspase activation as compared to control ASO-1 (Table 15).

TABLE 15
Assay Results for ASOs with Mismatch

| | | | Caspase | | | |
|---|---|---|---|---|---|---|
| | | Caspase | Activity: | | | |
| | | Activity: Fold | Fold vs. | hTLR8 | | |
| | | vs. ASO-1 at | ASO-1 at | Fold vs. | HepG2.2.15 | HepG2.2.15 |
| ASO | Position | 167 nM | 56 nM | ASO-1 | EC50 (nM) | CC50 (nM) |
| ASO-682 | MMPos9_dA | 1.02 | 0.28 | 1.01 | 10.86 | >167 |
| ASO-683 | MMPos9_d(5m)C | 0.60 | 0.05 | 0.87 | 4.69 | >167 |
| ASO-684 | MMPos9_dT | 0.78 | 0.15 | 0.89 | 5.29 | >167 |
| ASO-685 | MMPos10_d(5m)C | 1.46 | 0.62 | 1.21 | 3.34 | >167 |
| ASO-686 | MMPos10_dG | 0.63 | 0.29 | 1.00 | 11.47 | >167 |
| ASO-687 | MMPos10_dT | 0.60 | 0.68 | 1.04 | 9.91 | >167 |
| ASO-688 | MMPos11_d(5m)C | 0.81 | 0.99 | 1.01 | 8.17 | >167 |
| ASO-689 | MMPos11_dG | 1.58 | 1.69 | 1.17 | 7.93 | >167 |
| ASO-690 | MMPos11_dT | 0.75 | 0.39 | 1.23 | 4.07 | >167 |
| ASO-691 | MMPos12_dA | 0.53 | 0.36 | 1.11 | 20.19 | >167 |
| ASO-692 | MMPos12_d(5m)C | 0.28 | 0.61 | 1.03 | 10.50 | >167 |
| ASO-693 | MMPos12_dT | 0.84 | 0.29 | 1.17 | 5.78 | >167 |
| ASO-1 | N/A | 1 | 1 | 1 | 10.32 | >167 |

[0346] The effect of ASO-687, ASO-691, ASO-692, ASO-693, ASO-683, ASO-684, ASO-686, and ASO-690, on HBsAg levels in plasma in were evaluated in an AAV-HBV C57BL/6 mouse model as described in Example 25. Group 1 was injected with PBS, Group 2 with ASO-1 control, Group 3 with ASO-139 control, and other groups were administered with ASO-687, ASO-691, ASO-692, ASO-693, ASO-683, ASO-684, ASO-686, ASO-690, ASO-687, and ASO-691. ASOs were dosed subcutaneously at 6×40 mg/kg on days 0, 3, 7, 10, 14 and 21. Most mismatched ASOs reduced HBsAg levels at different degrees (FIG. 14, left side). The in vivo potency rank order of mismatched ASOs cannot be predicted from their in vitro rank order. ASO-687 was the most potent mismatched ASO in reducing HBsAg in AAV-HBV mouse: potency was between ASO-1 and ASO-139.

### Example 30: ASOs Mismatch Walk in Gap Positions Based on ASO-1

[0347] To assess the effect of mismatch in the gap regions, ASO-1 was used as the parental ASO and a mismatch walk of positions 6-8 was performed to prepare ASO-743, ASO-744, ASO-745, ASO-746, ASO-747, ASO-748, ASO-749, ASO-750, and ASO-751. Additionally, a mismatch at positions 13-15 was also performed to prepare ASO-753, ASO-755, ASO-756, ASO-757, ASO-758, ASO-759, ASO-760, ASO-761, and ASO-762. The ASOs were subjected to the assays described in Example 2 to determine RNAse H-mediated degradation, cytotoxicity, TLR8 pathway activation, and caspase activation as compared to control ASO-1 (Table 16). ASO-755 showed an improved caspase profile with similar RNase H and hTLR8 activities (Table 16).

TABLE 16
Assay Results for ASOs with Mismatch in Gap positions

| | | Caspase | | | | |
|---|---|---|---|---|---|---|
| | | Fold over | Caspase Fold | | | hTLRA |
| Mismatch | | ASO-1 | over ASO-1 | EC50 | CC50 | Fold over |
| of ASO-1 | Description | 167 nM | 56 nM | nM | nM | ASO-1 |
| ASO-1 | N/A | 1 | 1 | 10.32 | >167 | |
| ASO-743 | Mismatch at position 6 (A) | 1.17 | 0.64 | 11.10 | >167 | 0.85 |
| ASO-744 | Mismatch at position 6 (5mC) | 2.36 | 2.41 | 9.919 | >167 | 0.54 |
| ASO-745 | Mismatch at position 6 (T) | 1.94 | 2.57 | 7.141 | >167 | 0.71 |
| ASO-746 | Mismatch at position 7 (A) | 0.90 | 2.17 | 5.714 | >167 | 0.90 |
| ASO-747 | Mismatch at position 7 (5mC) | 1.22 | 1.75 | 10.29 | >167 | 0.73 |
| ASO-748 | Mismatch at position 7 (T) | 1.30 | 1.30 | 21.15 | >167 | 0.92 |
| ASO-749 | Mismatch at position 8 (A) | 1.19 | 0.57 | 8.78 | >167 | 0.89 |
| ASO-750 | Mismatch at position 8 (5mC) | 0.66 | 0.34 | 12.05 | >167 | 0.50 |
| ASO-751 | Mismatch at position 8 (G) | 1.07 | 2.53 | 9.96 | >167 | 0.65 |
| ASO-753 | Mismatch at position 15 (G) | 1.65 | 1.07 | 19.33 | >167 | 0.62 |
| ASO-755 | Mismatch at position 15 (T) | 0.82 | 0.86 | 15.79 | >167 | 1.06 |
| ASO-756 | Mismatch at position 15 (5mC) | 1.01 | 0.68 | 28.197 | >167 | 1.16 |
| ASO-757 | Mismatch at position 14 (A) | 0.20 | 0.18 | 51.71 | >167 | 1.05 |
| ASO-758 | Mismatch at position 14 (T) | 0.54 | 0.82 | 30.53 | >167 | 1.13 |
| ASO-759 | Mismatch at position 14 (5mC) | 0.78 | 0.76 | 27.21 | >167 | 0.80 |
| ASO-760 | Mismatch at position 13 (A) | 0.45 | 0.11 | >167 | >167 | 1.11 |
| ASO-761 | Mismatch at position 13 (T) | 0.31 | 0 | 110.72 | >167 | 0.98 |
| ASO-762 | Mismatch at position 13 (G) | 1.12 | 0.41 | 57.53 | >167 | 0.63 |

### Example 31: ASOs 2′-Deoxy Abasic Monomer Walk Based on ASO-1

[0348] To assess the effect of 2′-deoxy abasic monomer modifications in the gap regions, ASO-1 was used as the parental ASO and ASO-702, ASO-703, ASO-704, ASO-705, ASO-706, ASO-707, ASO-708, ASO-709, ASO-710, and ASO-711 were prepared (FIG. 15). The ASOs were subjected to the assays described in Example 2 to determine RNAse H-mediated degradation, cytotoxicity, TLR8 pathway activation, and caspase activation as compared to control ASO-1 (Table 17). All ASOs show improved caspase profiles. ASO-703 and ASO-709 showed significant loss of RNase H activity. ASO-704, ASO-706, and ASO-707 showed similar RNase H and hTLR8 activity as compared to ASO-1 (Table 17).

TABLE 17
Assay Results for ASOs with 2′-deoxy abasic
monomer modifications in the gap regions

| | | Caspase | | hTLR8 | | |
|---|---|---|---|---|---|---|
| ASO-1 | | Fold over | Caspase Fold | Fold | | |
| 2′deoxy | | ASO-1 | over ASO-1 | over | EC50 | CC50 |
| walk | Position | 167 nM | 56 nM | ASO-1 | nM | nM |
| ASO-702 | 6 | 0.70 | 0.41 | 0.70 | 22.63 | >167 |
| ASO-703 | 7 | 0.12 | 0.11 | 0.80 | >167 | >167 |
| ASO-704 | 8 | 0.83 | 0.15 | 0.92 | 14.53 | >167 |
| ASO-705 | 9 | 0.77 | 0.18 | 1.01 | 28.08 | >167 |
| ASO-706 | 10 | 0.71 | 0.40 | 0.88 | 16.42 | >167 |
| ASO-707 | 11 | 0.68 | 0.17 | 0.94 | 19.16 | >167 |
| ASO-708 | 12 | 0.41 | 0.11 | 0.76 | 61.31 | >167 |
| ASO-709 | 13 | 0.25 | 0.26 | 0.90 | 90.09 | >167 |
| ASO-710 | 14 | 0.59 | 0.43 | 0.75 | 26.13 | >167 |
| ASO-711 | 15 | 0.81 | 0.47 | 0.77 | 39.28 | >167 |
| ASO-1 | | 1 | 1 | 1 | 10.3 | >167 |

[0349] The effect of ASO-704, ASO-706, ASO-707, and ASO-710, on HBsAg levels in plasma were evaluated in an AAV-HBV C57BL/6 mouse model as described in Example 25. Group 1 was injected with PBS, Group 2 with ASO-1 control, Group 3 with ASO-139 control, Group 13 with ASO-704, Group 14 with ASO-706, Group 15 with ASO-707, and Group 16 with ASO-710. Mice were injected in days 0, 3, 7, 10, 14, and 21, with 25 mg/kg. ASO-707 shows similar potency to ASO-139 control, and significantly higher potency than ASO-1 control (FIG. 16). As shown in Table 17, 2′ Deoxy abasic modification at different locations in the gap region improved in vitro safety profile as demonstrated by caspase reduction. However, the impact of such modification on in vitro potency is location dependent. ASO-704, ASO-706, ASO-707 and ASO-710 showed similar or slightly lower in vitro activities compared with ASO-1. As shown in FIG. 16, although ASO-706 and ASO-707 showed similar or slightly lower in vitro activity relative to ASO-1, both of these ASOs significantly outperformed ASO-1 in the AAV-HBV mouse model. Moreover, incorporating a 2′ Deoxy Abasic modification in ASO-706 and ASO-707 appears to significantly improve liver exposure and liver-to-kidney ratio relative to reference ASOs: ASO-1 and ASO-139 (FIG. 16). For treating liver disease, ASO-706 and ASO-707 show PK advantage compared with references ASO-1 and ASO-139.

### Example 32: ASOs 2′-OMe Abasic Monomer Gap and LNA Walk Based on ASO-672

[0350] To assess the effect of 2′-OMe abasic monomer modifications in the gap regions and LNA modifications at the wings, ASO-672 as described in Example 28 was used as the parental ASO and ASO-786 to ASO-830, were prepared (FIG. 17-FIG. 20).

[0351] The ASOs were subjected to the assays described in Example 2 to determine RNAse H-mediated degradation, cytotoxicity, TLR8 pathway activation, and caspase activation as compared to control ASO-1 and ASO-672 (FIG. 18 and FIG. 20). Most ASOs showed improved caspase profiles. ASO-790, ASO 791, ASO-793, ASO-794, ASO-796, ASO-806, ASO-807, ASO-812, ASO-817, ASO-818, ASO-819, ASO-822, ASO-825, ASO-828 and ASO-829 showed similar RNase H and as compared to ASO-1 (Tables 18 and 19). ASO-810, ASO-816, ASO-819, ASO-820, ASO-822, ASO-823, ASO-824 and ASO-828 had similar hTLR8 activity as compared to ASO-1.

TABLE 18
Assay Results for ASOs based on ASO 672 with LNA Walk

| | | Caspase | | | | |
|---|---|---|---|---|---|---|
| | | Fold over | Caspase Fold | | | TLR8 |
| ASO-672 + | | ASO-1 | over ASO-1 | EC50 | CC50 | Fold over |
| LNA Walk | Position | 167 nM | 56 nM | nM | nM | ASO-1 |
| ASO-786 | mX 6 LNA 1 2 | 0.82 | 0.3 | 5.84 | >167 | 0.68 |
| ASO-787 | mX 6 LNA 1 3 | 0.66 | 0.37 | 6.49 | >167 | 0.69 |
| ASO-788 | mX 6 LNA 1 4 | 1.24 | 0.27 | 6.68 | >167 | 0.74 |
| ASO-789 | mX 6 LNA 1 5 | 1.07 | 0.05 | 8.00 | >167 | 0.67 |
| ASO-790 | mX 6 LNA 1 16 | 1.19 | 0.06 | 14.76 | >167 | 0.63 |
| ASO-791 | mX 6 LNA 1 17 | 0.93 | 0.11 | 12.31 | >167 | 0.53 |
| ASO-792 | mX 6 LNA 1 18 | 1.65 | 0.58 | 6.78 | >167 | 0.62 |
| ASO-793 | mX 6 LNA 1 19 | 0.76 | −0.27 | 13.39 | >167 | 0.60 |
| ASO-794 | mX 6 LNA 1 20 | 1.39 | 0.50 | 13.19 | >167 | 0.61 |
| ASO-1 | | 1 | 1 | 10.46 | >167 | 1 |

TABLE 19
Assay Results for ASOs based on ASO-672
with 2′-OMe abasic monomer Gap and LNA

| ASO-672 | | | | | | |
|---|---|---|---|---|---|---|
| 2′OMe | | Caspase | | | | |
| abasic | | Fold over | Caspase Fold | | | hTLR8 |
| monomer + | | ASO-1 | over ASO-1 | EC50 | CC50 | Fold over |
| LNA Walk | Position | 167 nM | 56 nM | nM | nM | ASO-1 |
| ASO-796 | mX 6 LNA 2 4 | 0.56 | 0.05 | 10.62 | >167 | 0.64 |
| ASO-797 | mX 6 LNA 2 5 | 0.24 | 0.10 | 5.80 | >167 | 0.59 |
| ASO-798 | mX 6 LNA 2 16 | 1.85 | 0.02 | 6.93 | >167 | 0.86 |
| ASO-799 | mX 6 LNA 2 17 | 1.05 | 0.44 | 7.91 | >167 | 0.59 |
| ASO-800 | mX 6 LNA 2 18 | 1.68 | 0.94 | 4.10 | >167 | 0.49 |
| ASO-795 | mX 6 LNA 2 3 | 0.60 | 0.42 | 7.57 | >167 | 0.63 |
| ASO-801 | mX 6 LNA 2 19 | 0.86 | 0.29 | 8.92 | >167 | 0.65 |
| ASO-802 | mX 6 LNA 2 20 | 1.85 | 0.83 | 7.90 | >167 | 0.65 |
| ASO-803 | mX 6 LNA 3 4 | 0.74 | 0.01 | 9.68 | >167 | 0.84 |
| ASO-804 | mX 6 LNA 3 5 | 0.44 | 0 | 8.62 | >167 | 0.85 |
| ASO-805 | mX 6 LNA 3 16 | 0.68 | 0.1 | 9.68 | >167 | 0.96 |
| ASO-806 | mX 6 LNA 3 17 | 0.58 | 0.01 | 17.86 | >167 | 0.63 |
| ASO-807 | mX 6 LNA 3 18 | 0.94 | 0.21 | 12.89 | >167 | 0.62 |
| ASO-808 | mX 6 LNA 3 19 | 0.99 | 0.61 | 6.57 | >167 | 0.75 |
| ASO-809 | mX 6LNA 3 20 | 1.27 | 0.08 | 7.999 | >167 | 0.64 |
| ASO-810 | mX 6 LNA 4 5 | 0.35 | 0.00 | 7.53 | >167 | 0.90 |
| ASO-811 | mX 6 LNA 4 16 | 0.85 | 0.27 | 6.58 | >167 | 0.95 |
| ASO-812 | mX 6 LNA 4 17 | 0.77 | 0.05 | 16.40 | >167 | 0.67 |
| ASO-813 | mX 6 LNA 4 18 | 1.16 | 0.24 | 9.20 | >167 | 0.74 |
| ASO-814 | mX 6 LNA 4 19 | 0.72 | 0.01 | 6.18 | >167 | 0.79 |
| ASO-815 | mX 6 LNA 4 20 | 0.98 | 0.06 | 7.72 | >167 | 0.77 |
| ASO-816 | mX 6 LNA 5 16 | 0.85 | 0.21 | 8.83 | >167 | 1.15 |
| ASO-817 | mX 6 LNA 5 17 | 0.15 | 0.001 | 12.24 | >167 | 0.79 |
| ASO-818 | mX 6 LNA 5 18 | 0.24 | 0.01 | 13.92 | >167 | 0.81 |
| ASO-819 | mX 6 LNA 5 19 | 0.13 | 0.12 | 17.46 | >167 | 0.92 |
| ASO-820 | mX 6 LNA 5 20 | 0.69 | 0.195 | 37.08 | >167 | 0.92 |
| ASO-821 | mX 6 LNA 16 17 | 0.436 | 0.188 | 47.92 | >167 | 0.91 |
| ASO-822 | mX 6 LNA 16 18 | 0.46 | 0 | 14.15 | >167 | 0.90 |
| ASO-823 | mX 6 LNA 16 19 | 0.86 | 0.12 | 21.64 | >167 | 1.02 |
| ASO-824 | mX 6 LNA 16 20 | 1.21 | 0.55 | 20.45 | >167 | 0.96 |
| ASO-825 | mX 6 LNA 17 18 | 1.07 | 0.45 | 14.91 | >167 | 0.64 |
| ASO-826 | mX 6 LNA 17 19 | 1.48 | 0.68 | 29.46 | >167 | 0.69 |
| ASO-827 | mX 6 LNA 17 20 | 2.16 | 1.48 | 24.31 | >167 | 0.72 |
| ASO-828 | mX 6 LNA 18 19 | 2.17 | 1.74 | 14.91 | >167 | 0.92 |
| ASO-829 | mX 6 LNA 18 20 | 1.76 | 1.41 | 16.49 | >167 | 0.70 |
| ASO-830 | mX 6 LNA 19 20 | 1.45 | 0.73 | 27.04 | >167 | 0.87 |
| ASO-672 | mX 6 | 0.52 | 0.17 | 25.53 | >167 | 0.95 |
| ASO-1 | | 1 | 1 | 10.46 | >167 | 1 |

### Example 33: LNA Pattern Screen on ASO-677

[0352] A pattern screen was performed to identify additional LNA modification to ASO-677 and ASO-960, ASO-961, ASO-962, ASO-963, ASO-964, and ASO-965, were prepared (FIG. 21). The ASOs were subjected to the assays described in Example 2 to determine RNase H-mediated degradation, cytotoxicity, TLR8 pathway activation, and caspase activation as compared to control ASO-1 and ASO-677 (Table 20). ASO-962, ASO-963, ASO-964, and ASO-965, improved RNase H activity from ASO-677 and maintained lower Caspase activity as compared to ASO-1 and similar hTLR8 activity as ASO-1.

TABLE 20
Assay Results for ASOs based on ASO-677 with different LNA patterns

| LNA | | Caspase | Caspase | | | |
|---|---|---|---|---|---|---|
| Patterns | | Fold over | Fold over | | | hTLR8 |
| on | | ASO-1 | ASO-1 | EC50 | CC50 | Fold over |
| ASO-677 | Position | 167 nM | 56 nM | nM | nM | ASO-1 |
| ASO-960 | X + LNA 3 and 5 | 0.86 | 0.83 | 4.40 | 90.48 | 1.14 |
| ASO-961 | X + LNA 4 and 5 | 1.19 | 1.36 | 5.06 | >167 | 1.25 |
| ASO-962 | X + LNA 4 and 16 | 0.52 | 0.17 | 7.0 | >167 | 1.01 |
| ASO-963 | X + LNA 5 and 16 | 0.55 | 0.24 | 7.86 | >167 | 0.94 |
| ASO-964 | X + LNA 5 and 19 | 0.87 | 0.84 | 8.09 | >167 | 0.81 |
| ASO-965 | X + LNA 16 and 18 | 0.61 | 0.36 | 6.74 | >167 | 0.90 |
| ASO-677 | mX 11-(2′ OMe) | 0.44 | 0.06 | 23.03 | >167 | 1.07 |
| ASO-1 | | 1 | 1 | 7.76 | >167 | 1 |

### Example 34: Mono-GalNAc Modifications to LNA and 2′OMe Abasic Monomer Modified ASO's

[0353] The effect of 5′ mono GalNAc modifications to ASOs with LNA and 2′OMe abasic monomer modifications was assessed. The parent construct ASO-962 was used to produce ASO-1067, the parent strain ASO-963 was used to produce ASO-1133, and the parent strain ASO-965 was used to produce ASO-1134 (FIG. 22). The effect of the produced ASOs on HBsAg levels in plasma were evaluated in an AAV-HBV C57BL/6 mouse model as described in Example 25. Group 1 was injected with PBS, Group 2 with ASO-1 control at 25 mg/kg, Group 3 with ASO-1 at 40 mg/kg control, Group 4 with ASO-139 at 25 kg/mg, Group 5 with ASO-962 at 25 kg/mg, Group 6 with ASO-1067 at 25 kg/mg, Group 7 with ASO-963 at 25 mg/kg, Group 8 with ASO-1133 at 25 mg/kg, Group 9 with ASO-965 at 25 mg/kg, and Group 10 with ASO-1134 at 25 mg/kg. Each group received 6 subcutaneous doses on days 0, 3, 7, 10, 14 and 21. On day 7, HBsAg was measured day 7 post Day 0 and D3 treatments, As shown in FIG. 28, 5′ Mono GalNAc ASOs were significantly more potent than unconjugated ASOs of same sequences, and two reference sequences on Day 7. When full time course of the study was analyzed (FIGS. 24-26), three 2′ OMe Abasic monomer modified, LNA containing ASOs ASO-962, ASO-963 and ASO-965 showed better in vivo potency than ASO-1, similar potency as ASO-139. The 5′ Mono GalNAc modified ASO-1067, ASO-1133 and ASO-1134 are significantly more potent than ASO-1, ASO-139 and their respective unconjugated sequences: ASO-962, ASO-963 and ASO-965.

[0354] Additionally, in vitro profiles—including caspase activity, hTLR8 activity, EC50 and CC50—were determined for mono GalNAc versions of several ASOs. As shown in the following tables (Tables 21-23), hTLR8 activity was similar between conjugated and unconjugated ASOs, RNaseH activity was generally reduced in vitro for ASOs conjugated to GalNAc, and mono GalNAc generally improved caspase 3/7 activity compared to unconjugated ASOs.

TABLE 21
In vitro Profiles of Mono GalNAc Versions of Reference ASOs

| | | Caspase | Caspase | | | |
|---|---|---|---|---|---|---|
| | | Fold over | Fold over | hTLR8 | | |
| | | ASO-1 | ASO-1 | Activity Over | HepG2.2.15 | HepG2.2.15 |
| Compound ID | Design | 167 nM | 56 nM | ASO-1 | EC50 (nM) | CC50 (nM) |
| ASO-1 | | 1 | 1 | 1.00 | 3.37 | >167 |
| ASO-1057 | ASO-1 | 0.95 | 0.48 | 0.88 | 10.15 | >167 |
| | GalNAc | | | | | |
| ASO-139 | | 1.02 | 0.92 | 0.78 | 0.58 | >167 |
| ASO-1058 | ASO-139 | 1.51 | 2.15 | 0.84 | 2.21 | >167 |
| | GalNAc | | | | | |

TABLE 22
In vitro Profiles of Mono GalNAc and Non-GalNAc Versions of ASOs

| | | Caspase | Caspase | | | hTLR8 |
|---|---|---|---|---|---|---|
| | | Fold over | Fold over | | | Fold |
| | | ASO-1 | ASO-1 | | | over |
| Compound ID | Design | 167 nM | 56 nM | EC50 (nM) | CC50 (nM) | ASO-1 |
| ASO-965 | ASO-6 w LNA | 1.51 | 1.27 | 3.70 | >167 | 1.32 |
| | Pos-15_17 | | | | | |
| ASO-1134 | mono GalNAc | 0.93 | 0.27 | 10.88 | >167 | 1.23 |
| | ASO-965 | | | | | |
| ASO-6 | | 1.19 | 0.46 | 9.51 | >167 | 1.12 |
| ASO-651 | mono GalNAc | 0.27 | 0.11 | 19.84 | >167 | 1.11 |
| | ASO-6 | | | | | |
| ASO-962 | ASO-677 LNA 4 | 0.68 | 0.56 | 12.59 | >167 | 0.92 |
| | and 16 | | | | | |
| ASO-1067 | mono GalNAc-ASO- | 0.45 | 0.17 | 17.36 | >167 | 0.96 |
| | 962 | | | | | |
| ASO-963 | ASO-677 LNA 5 and | 0.79 | 0.74 | 9.98 | >167 | 0.85 |
| | 16 | | | | | |
| ASO-1133 | mono GalNAc-ASO- | 0.43 | 0.19 | 17.71 | >167 | 1.26 |
| | 963 | | | | | |
| ASO-1 | | 1 | 1 | 4.82 | >167 | 1.00 |

TABLE 23
In vitro Profiles of Mono GalNAc and Non-GalNAc Versions of ASOs

| | | Caspase | Caspase | | | hTLR8 |
|---|---|---|---|---|---|---|
| | | Fold over | Fold over | | | Fold |
| | | ASO-1 | ASO-1 | | | over |
| Compound ID | Design | 167 nM | 56 nM | EC50 (nM) | CC50 (nM) | ASO-1 |
| ASO-965 | ASO-677 LNA 16 | 0.77 | 0.36 | 9.41 | >167 | 1.11 |
| | and 18 | | | | | |
| ASO-1134 | 5′ mono GalNAc- | 0.75 | 0.09 | 9.79 | >167 | 1.18 |
| | ASO-965 | | | | | |
| ASO-687 | ASO- | 0.86 | 0.34 | 7.53 | >167 | 1.03 |
| | 1_MMPos10_dT | | | | | |
| ASO-1195 | 5′ mono GalNAc- | 0.45 | 0.14 | 15.44 | >167 | 0.93 |
| | ASO-687 | | | | | |
| ASO-677 | ASO-1_mX 11 | 0.65 | 0.53 | 11.19 | >167 | 0.91 |
| ASO-1166 | 5′ mono GalNAc | 0.25 | 0.13 | 24.23 | >167 | 0.94 |
| | ASO-677 | | | | | |
| ASO-1020 | ASO-1 mX 11 LNA | 0.64 | 0.42 | 5.81 | >167 | 0.94 |
| | 3 18 | | | | | |
| ASO-1194 | 5′ mono GalNAc | 0.65 | 0.16 | 8.11 | >167 | 0.83 |
| | ASO-1020 | | | | | |
| ASO-1036 | ASO-1 mX 11 LNA | 0.77 | 0.51 | 3.65 | >167 | 0.81 |
| | 18 19 | | | | | |
| ASO-1181 | mono GalNAc ASO- | 0.71 | 0.21 | 9.97 | >167 | 0.75 |
| | 1036 | | | | | |
| ASO-1037 | ASO-1 mX 11 LNA | 10.78 | 0.52 | 4.61 | >167 | 0.70 |
| | 18 20 | | | | | |
| ASO-1179 | mono GalNAc ASO- | 0.78 | 0.23 | 6.73 | >167 | 0.92 |
| | 1037 | | | | | |
| ASO-945 | Mismatched ASO- | 0.91 | 0.45 | 6.55 | >167 | 0.98 |
| | 693_LNA-16_18 | | | | | |
| ASO-1180 | mono GalNAc ASO- | 0.50 | 0.21 | 9.07 | >167 | 1.20 |
| | 945 | | | | | |
| ASO-1 | | 1 | 1 | 4.82 | >167 | 1.00 |

### Example 35: LNA Modification Pattern Screen on Mismatched ASO-686, ASO-692, ASO-693, ASO-683, ASO-690

[0355] A LNA modification pattern screen was performed on the mismatched ASO-686 to produce ASO-966, ASO-967, ASO-968, ASO-969, ASO-970, and ASO-971. The LNA pattern identified in Example 35 was applied to ASO-692 to produce ASO-934, ASO-935, ASO-936, ASO-937, ASO-938, and ASO-939; ASO-693 to produce ASO-940, ASO-941, ASO-942, ASO-943, ASO-944, and ASO-945; ASO-683 to produce ASO-972, ASO-973, ASO-974, ASO-975, ASO-976, and ASO-977; and ASO-690 to produce ASO-978, ASO-979, ASO-980, ASO-981, ASO-982, and ASO-983. The ASO's were subjected to the assays described in Example 2 to determine RNAse H-mediated degradation, cytotoxicity, TLR8 pathway activation, and caspase activation as compared to control ASO-1 and ASO-686 (Table 24). ASO-686 with LNA modification increased toxicity as compared to the parent construct or ASO-1. ASO-939 showed an improvement in caspase over ASO-1 (Table 25). ASO-945 improved caspase and EC50 as compared to ASO-1 (Table 26). ASO-977, ASO-980 and ASO-982 retained lower caspase activity (Table 27 and Table 28).

TABLE 24
Assay Results for ASO's based on ASO-686 with different LNA patterns

| LNA | | Caspase | Caspase | | | |
|---|---|---|---|---|---|---|
| Patterns | | Fold over | Fold over | | | TLR8 |
| on | | ASO-1 | ASO-1 | EC50 | CC50 | Fold over |
| ASO-686 | Position | 167 nM | 56 nM | nM | nM | ASO-1 |
| ASO-966 | G + LNA 3 and 5 | 2.92 | 4.33 | 4.12 | 89.5 | 0.74 |
| ASO-967 | G + LNA 4 and 5 | 2.92 | 4.69 | 3.13 | 63.35 | 0.81 |
| ASO-968 | G + LNA 4 and 16 | 2.16 | 1.93 | 4.26 | >167 | 0.86 |
| ASO-969 | G + LNA 5 and 16 | 2.52 | 4.64 | 5.64 | >167 | 0.85 |
| ASO-970 | G + LNA 5 and 19 | 2.64 | 4.55 | 5.79 | 166.83 | 0.74 |
| ASO-971 | G + LNA 16 and 18 | 1.89 | 1.54 | 3.66 | >167 | 1.07 |
| ASO-686 | G10-2′-Deoxy MM) | 1.01 | 0.23 | 16.68 | >167 | 1.09 |
| ASO-1 | | 1 | 1 | 7.76 | >167 | 1 |

TABLE 25
Assay Results for ASO's based on ASO-692 with different LNA patterns

| LNA | | Caspase | Caspase | | | |
|---|---|---|---|---|---|---|
| Patterns | | Fold over | Fold over | | | TLR8 |
| on ASO- | | ASO-1 | ASO-1 | EC50 | CC50 | Fold over |
| 692 | Position | 167 nM | 56 nM | nM | nM | ASO-1 |
| ASO-934 | LNA 3 and 5 | 1.91 | 3.51 | 4.82 | >167 | 0.91 |
| ASO-935 | LNA 4 and 5 | 2.30 | 4.53 | 10.98 | 64.26 | 1.04 |
| ASO-936 | LNA 4 and 16 | 1.20 | 1.49 | 7.74 | >167 | 1.10 |
| ASO-937 | LNA 5 and 16 | 1.31 | 2.63 | 3.40 | >167 | 0.90 |
| ASO-938 | LNA 5 and 19 | 1.49 | 2.84 | 21.15 | >167 | 0.74 |
| ASO-939 | LNA 16 and 18 | 0.89 | 0.86 | 8.26 | >167 | 0.87 |
| ASO-139 | | 0.20 | 0.27 | 13.18 | >167 | 0.78 |
| ASO-1 | | 1 | 1 | 7.76 | >167 | 1 |

TABLE 26
Assay Results for ASO's based on ASO-693 with different LNA patterns

| LNA | | Caspase | Caspase | | | |
|---|---|---|---|---|---|---|
| Patterns | | Fold over | Fold over | | | TLR8 |
| on ASO- | | ASO-1 | ASO-1 | EC50 | CC50 | Fold over |
| 693 | Position | 167 nM | 56 nM | nM | nM | ASO-1 |
| ASO-940 | LNA 3 and 5 | 2.14 | 2.25 | 7.23 | >167 | 0.71 |
| ASO-941 | LNA 4 and 5 | 2.08 | 2.17 | 5.97 | >167 | 0.77 |
| ASO-942 | LNA 4 and 16 | 0.95 | 0.65 | 5.37 | >167 | 0.88 |
| ASO-943 | LNA 5 and 16 | 1.62 | 1.46 | 6.46 | >167 | 1.07 |
| ASO-944 | LNA 5 and 19 | 1.69 | 1.10 | 8.88 | >167 | 0.84 |
| ASO-945 | LNA 16 and 18 | 0.55 | 0.26 | 3.75 | >167 | 1.10 |
| ASO-693 | 2′-Deoxy MM | 0.16 | 0.10 | 27.78 | >167 | 0.78 |
| ASO-1 | | 1 | 1 | 7.76 | >167 | 1 |

TABLE 27
Assay Results for ASO's based on ASO-683 with different LNA patterns

| LNA | | Caspase | Caspase | | | |
|---|---|---|---|---|---|---|
| Patterns | | Fold over | Fold over | | | TLR8 |
| on ASO- | | ASO-1 | ASO-1 | EC50 | CC50 | Fold over |
| 683 | Position | 167 nM | 56 nM | nM | nM | ASO-1 |
| ASO-972 | LNA 3 and 5 | 1.64 | 1.34 | 4.28 | >167 | 1.23 |
| ASO-973 | LNA 4 and 5 | 1.76 | 1.20 | 4.01 | >167 | 1.57 |
| ASO-974 | LNA 4 and 16 | 1.07 | 0.35 | 7.16 | >167 | 1.67 |
| ASO-975 | LNA 5 and 16 | 1.27 | 0.55 | 5.53 | >167 | 1.42 |
| ASO-976 | LNA 5 and 19 | 1.24 | 0.78 | 5.14 | >167 | 1.14 |
| ASO-977 | LNA 16 and 18 | 0.50 | 0.16 | 6.04 | >167 | 1.31 |
| ASO-683 | 2′-Deoxy MM | 0.27 | 0 | 12.2 | >167 | 0.82 |
| ASO-1 | | 1 | 1 | 4.95 | >167 | 1 |

TABLE 28
Assay Results for ASO's based on ASO-690 with different LNA patterns

| LNA | | Caspase | Caspase | | | |
|---|---|---|---|---|---|---|
| Patterns | | Fold over | Fold over | | | hTLR8 |
| on | | ASO-1 | ASO-1 | EC50 | CC50 | Fold Over |
| ASO-690 | Position | 167 nM | 56 nM | nM | nM | ASO-1 |
| ASO-978 | LNA 3 and 5 | 1.14 | 1.12 | 5.00 | >167 | 1.03 |
| ASO-979 | LNA 4 and 5 | 1.36 | 1.00 | 3.65 | >167 | 0.75 |
| ASO-980 | LNA 4 and 16 | 0.55 | 0.24 | 4.05 | >167 | 0.86 |
| ASO-981 | LNA 5 and 16 | 1.03 | 0.48 | 4.76 | >167 | 0.80 |
| ASO-982 | LNA 5 and 19 | 0.63 | 0.71 | 3.98 | >167 | 0.71 |
| ASO-983 | LNA 16 and 18 | 0.54 | 0.91 | 2.79 | 57.801 | 0.74 |
| ASO-690 | 2′-Deoxy MM | 0.64 | 0.56 | 7.24 | >167 | 1.15 |
| ASO-1 | | 1 | 1 | 4.95 | >167 | 1 |

### Example 36: LNA Modification Pattern to 2′ Deoxy Abasic ASO Parental Sequences, ASO-707 and ASO-706

[0356] The LNA pattern identified in Example 35 was applied to parental ASO-706 to produce ASO-984, ASO-985, ASO-986, ASO-987, ASO-988, and ASO-989; and to parental 707 to produce ASO 1167, ASO 1168, ASO 1169, ASO 1170, ASO 1171 and ASO1172 (FIG. 27). The ASO's were subjected to the assays described in Example 2 to determine RNAse H-mediated degradation, cytotoxicity, TLR8 pathway activation, and caspase activation. ASO-985, ASO-989 and ASO-988 improved overall profile over parent ASO-706. ASO-1167, ASO-1168 and ASO-1171 showed overall improvement over parent ASO-707. (Table 29)

TABLE 29
Assay Results for ASO's based on ASO-706
and ASO-707 with different LNA patterns

| | | Caspase | Caspase | | | |
|---|---|---|---|---|---|---|
| LNA | | Fold over | Fold over | | | hTLR8 |
| Pattern on | | ASO-1 | ASO-1 | EC50 | CC50 | Fold over |
| ASO-706 | Position | 167 nM | 56 nM | nM | nM | ASO-1 |
| ASO-984 | LNA 3 and 5 | 0.63 | 0.38 | 5.43 | >167 | 0.73 |
| ASO-985 | LNA 4 and 5 | 0.62 | 0.25 | 5.51 | >167 | 0.82 |
| ASO-986 | LNA 4 and 16 | 0.43 | 0.23 | 26.30 | >167 | 0.90 |
| ASO-987 | LNA 5 and 16 | 0.52 | 0.09 | 10.67 | >167 | 0.82 |
| ASO-988 | LNA 5 and 19 | 0.47 | 0.59 | 6.55 | >167 | 0.85 |
| ASO-989 | LNA 16 and 18 | 0.26 | 0.54 | 12.99 | >167 | 1.11 |
| ASO-706 | 2′-Deoxy Abasic | 0.71 | 0.40 | 22.85 | >167 | 0.89 |
| ASO-1 | | 1 | 1 | 4.95 | >167 | 1 |
| | | Caspase | Caspase | | | |
| LNA | | Fold over | Fold over | | | hTLR8 |
| Pattern on | | ASO-1 | ASO-1 | EC50 | CC50 | Fold over |
| ASO-707 | Position | 167 nM | 56 nM | nM | nM | ASO-1 |
| ASO-1167 | LNA 3 and 5 | 0.73 | 0.56 | 2.24 | >167 | 1.07 |
| ASO-1168 | LNA 4 and 5 | 0.83 | 0.81 | 5.75 | >167 | 1.09 |
| ASO-1169 | LNA 4 and 16 | 0.73 | 0.67 | 7.88 | >167 | 1.11 |
| ASO-1170 | LNA 5 and 16 | 0.64 | 0.82 | 6.93 | >167 | 1.05 |
| ASO-1171 | LNA 5 and 19 | 0.63 | 0.75 | 4.56 | >167 | 0.93 |
| ASO-1172 | LNA 16 and 18 | 0.30 | 0.00 | 7.36 | >167 | 1.08 |
| ASO-707 | 2′-Deoxy Abasic | 0.78 | 0.88 | 11.67 | >167 | 1.03 |
| ASO-1 | | 1 | 1 | 4.02 | >167 | 1.00 |

### Example 37: Single LNA Modification on Mismatch ASO's

[0357] ASOs were prepared with an LNA modification at positions 5 or 17 and a mismatch at positions 9, 10, 11, or 12. ASO-683 was used to prepare ASO-947 and ASO-946, ASO-686 was used to prepare ASO-948 and ASO-949, ASO-690 was used to prepare ASO-950 and ASO-951 (Table 1), ASO-692 was used to prepare ASO-952 and ASO-953, and ASO-693 was used to prepare ASO-954 and ASO-955. The ASOs were subjected to the assays described in Example 2 to determine RNAse H-mediated degradation, cytotoxicity, TLR8 pathway activation, and caspase activation (Table 30 and Table 31). ASO-947 showed lower caspase activity compared to ASO-1 (Table 30).

TABLE 30
Assay Results for ASOs different LNA and Mismatch patterns

| | | Caspase | Caspase | |
|---|---|---|---|---|
| | | Fold over | Fold over | TLR8 |
| | Position (LNA | ASO-1 | ASO-1 | Fold over |
| ASO | pattern and MM) | 167 nM | 56 nM | ASO-1 |
| ASO-946 | LNA 5 MM9 | 1.41 | 1.03 | 1.24 |
| ASO-947 | LNA 17 MM9 | 0.36 | 0.71 | 1.36 |
| ASO-948 | LNA 5 MM10 | 1.89 | 2.80 | 1.00 |
| ASO-949 | LNA 17 MM10 | 2.18 | 1.41 | 0.94 |
| ASO-950 | LNA 5 MM11 | 1.69 | 1.14 | 0.85 |
| ASO-951 | LNA 17 MM11 | 1.52 | 0.79 | 0.89 |
| ASO-139 | LNA17, 19, 20 | 1.48 | 2.16 | 0.72 |
| ASO-1 | | 1 | 1 | 1 |

TABLE 31
Assay Results for ASOs different LNA and Mismatch patterns

| | | Caspase | Caspase | |
|---|---|---|---|---|
| LNA | | Fold over | Fold over | TLR8 |
| Pattern + | | ASO-1 | ASO-1 | Fold over |
| MM | Position | 167 nM | 56 nM | ASO-1 |
| ASO-952 | LNA 5 MM12 | 0.57 | 1.96 | 0.62 |
| ASO-953 | LNA 17 MM12 | 1.17 | 0.46 | 0.61 |
| ASO-954 | LNA 5 MM12 | 1.23 | 0.82 | 0.75 |
| ASO-955 | LNA 17 MM12 | 0.91 | 1.03 | 0.73 |
| ASO-139 | LNA17, 19, 20 | 1.48 | 2.16 | 0.72 |
| ASO-1 | | 1 | 1 | 1 |

### Example 38: LNA Modification and 2′-OMe Abasic ASOs

[0358] ASO-677 from Example 28 that contains a 2′-OMe Abasic modification at position 11 was used to create additional ASOs using a 2×LNA walk as shown in FIG. 28, FIG. 29, FIG. 30, FIG. 31, and FIG. 32, and 1×LNA walk as shown in FIG. 33. The ASOs were subjected to the assays described in Example 2 to determine RNAse H-mediated degradation, cytotoxicity, TLR8 pathway activation, and caspase activation, with 2×LNA walk showing better improvement than 1×LNA walk (Table 32, Table 33, Table 34, Table 35, Table 36, and Table 37).

TABLE 32
Assay Results for ASOs based on ASO-677 different
LNA and 2′-OMe abasic monomer patterns

| | | Caspase | Caspase | | | |
|---|---|---|---|---|---|---|
| ASO-677 | | Fold over | Fold over | | | TLR8 |
| 2x LNA | | ASO-1 | ASO-1 | EC50 | CC50 | Fold over |
| walk | Position | 167 nM | 56 nM | nM | nM | ASO-1 |
| ASO-1000 | mX 11 LNA 1 2 | 0.75 | 0.26 | 2.99 | >167 | 0.89 |
| ASO-1001 | mX 11 LNA 1 3 | 0.85 | 0.34 | 5.64 | >167 | 0.87 |
| ASO-1002 | mX 11 LNA 1 4 | 0.98 | 0.18 | 5.12 | >167 | 0.88 |
| ASO-1003 | mX 11 LNA 1 5 | 0.98 | 0.25 | 3.91 | >167 | 0.85 |
| ASO-1004 | mX 11 LNA 1 16 | 0.55 | 0.17 | 5.71 | >167 | 0.69 |
| ASO-1005 | mX 11 LNA 1 17 | 0.81 | 0.34 | 5.72 | >167 | 0.71 |
| ASO-1006 | mX 11 LNA 1 18 | 0.77 | 0.41 | 3.78 | >167 | 0.68 |
| ASO-1007 | mX 11 LNA 1 19 | 0.82 | 0.44 | 6.16 | >167 | 0.69 |
| ASO-677 | mX 11 | 0.79 | 0.37 | 7.83 | >167 | 1.04 |
| ASO-1 | | 1 | 1 | 4.29 | >167 | 1 |

TABLE 33
Assay Results for ASOs based on ASO-677
different LNA and 2′-OMe Abasic patterns

| | | Caspase | Caspase | | | |
|---|---|---|---|---|---|---|
| ASO-677 | | Fold over | Fold over | | | TLR8 |
| 2x LNA | | ASO-1 | ASO-1 | EC50 | CC50 | Fold over |
| walk | Position | 167 nM | 56 nM | nM | nM | ASO-1 |
| ASO-1008 | mX 11 LNA 1 20 | 0.82 | 0.35 | 4.68 | >167 | 0.74 |
| ASO-1009 | mX 11 LNA 2 3 | 1.10 | 0.55 | 3.26 | >167 | 0.98 |
| ASO-1010 | mX 11 LNA 2 4 | 1.29 | 0.80 | 3.52 | >167 | 0.96 |
| ASO-1011 | mX 11 LNA 2 5 | 1.26 | 0.70 | 3.18 | >167 | 0.94 |
| ASO-1012 | mX 11 LNA 2 16 | 0.84 | 0.46 | 4.82 | >167 | 1.16 |
| ASO-1013 | mX 11 LNA 2 17 | 0.95 | 0.63 | 4.22 | >167 | 1.16 |
| ASO-1014 | mX 11 LNA 2 18 | 1.03 | 0.36 | 2.97 | >167 | 0.91 |
| ASO-1015 | mX 11 LNA 2 19 | 1.06 | 0.72 | 4.61 | >167 | 0.94 |
| ASO-677 | mX 11 | 0.79 | 0.37 | 7.83 | >167 | 1.04 |
| ASO-1 | | 1 | 1 | 4.29 | >167 | 1 |

TABLE 34
Assay Results for ASOs based on ASO-677 different
LNA and 2′-OMe abasic monomer patterns

| | | Caspase | Caspase | | | |
|---|---|---|---|---|---|---|
| ASO-677 | | Fold over | Fold over | | | TLR8 |
| 2x LNA | | ASO-1 | ASO-1 | EC50 | CC50 | Fold over |
| walk | Position | 167 nM | 56 nM | nM | nM | ASO-1 |
| ASO-1016 | mX 11 LNA 2 20 | 1.08 | 0.54 | 2.69 | >167 | 0.96 |
| ASO-1017 | mX 11 LNA 3 4 | 1.05 | 0.26 | 3.89 | >167 | 1.29 |
| ASO-1018 | mX 11 LNA 3 16 | 0.94 | 0.42 | 4.32 | >167 | 1.18 |
| ASO-1019 | mX 11 LNA 3 17 | 1.03 | 0.36 | 3.87 | >167 | 0.88 |
| ASO-1020 | mX 11 LNA 3 18 | 0.77 | 0.28 | 1.97 | >167 | 0.97 |
| ASO-1021 | mX 11 LNA 3 19 | 0.80 | 0.45 | 2.26 | >167 | 0.82 |
| ASO-1022 | mX 11 LNA 3 20 | 0.88 | 0.60 | 2.68 | >167 | 0.93 |
| ASO-1023 | mX 11 LNA 4 17 | 0.92 | 0.34 | 4.36 | >167 | 1.14 |
| ASO-677 | mX 11 | 0.79 | 0.37 | 7.83 | >167 | 1.04 |
| ASO-1 | | 1 | 1 | 4.29 | >167 | 1 |

TABLE 35
Assay Results for ASOs based on ASO-677 different
LNA and 2′-OMe abasic monomer patterns

| | | Caspase | Caspase | | | |
|---|---|---|---|---|---|---|
| ASO-677 | | Fold over | Fold over | | | TLR8 |
| 2x LNA | | ASO-1 | ASO-1 | EC50 | CC50 | Fold over |
| walk | Position | 167 nM | 56 nM | nM | nM | ASO-1 |
| ASO-1024 | mX 11 LNA 4 18 | 0.95 | 0.39 | 1.57 | >167 | 1.13 |
| ASO-1025 | mX 11 LNA 4 19 | 0.99 | 0.38 | 4.14 | >167 | 1.11 |
| ASO-1026 | mX 11 LNA 4 20 | 1.05 | 0.39 | 3.44 | >167 | 1.13 |
| ASO-1027 | mX 11 LNA 5 17 | 1.11 | 0.48 | 4.17 | >167 | 1.02 |
| ASO-1028 | mX 11 LNA 5 18 | 0.83 | 0.52 | 2.46 | >167 | 1.15 |
| ASO-1029 | mX 11 LNA 5 20 | 0.91 | 0.76 | 2.48 | >167 | 1.09 |
| ASO-1030 | mX 11 LNA 16 17 | 0.94 | 0.39 | 7.49 | >167 | 1.21 |
| ASO-1031 | mX 11 LNA 16 19 | 0.50 | 0.30 | 8.19 | >167 | 1.06 |
| ASO-677 | mX 11 | 0.79 | 0.37 | 7.83 | >167 | 1.04 |
| ASO-1 | | 1 | 1 | 4.29 | >167 | 1 |

TABLE 36
Assay Results for ASOs based on ASO-677 different
LNA and 2′-OMe abasic monomer patterns

| | | Caspase | Caspase | | | |
|---|---|---|---|---|---|---|
| ASO-677 | | Fold over | Fold over | | | TLR8 |
| 2x LNA | | ASO-1 | ASO-1 | EC50 | CC50 | Fold over |
| walk | Position | 167 nM | 56 nM | nM | nM | ASO-1 |
| ASO-1032 | mX 11 LNA 16 20 | 0.86 | 0.41 | 4.84 | >167 | 1.10 |
| ASO-1033 | mX 11 LNA 17 18 | 0.91 | 0.31 | 3.73 | >167 | 1.07 |
| ASO-1034 | mX 11 LNA 17 19 | 0.94 | 0.46 | 4.79 | >167 | 0.98 |
| ASO-1035 | mX 11 LNA 17 20 | 0.97 | 0.65 | 3.92 | >167 | 1.08 |
| ASO-1036 | mX 11 LNA 18 19 | 0.65 | 0.40 | 1.08 | >167 | 1.00 |
| ASO-1037 | mX 11 LNA 18 20 | 0.76 | 0.58 | 2.39 | >167 | 1.07 |
| ASO-1038 | mX 11 LNA 19 20 | 0.81 | 0.82 | 3.78 | >167 | 1.10 |
| ASO-677 | mX 11 | 0.79 | 0.37 | 7.83 | >167 | 1.04 |
| ASO-1 | | 1 | 1 | 4.29 | >167 | 1 |

TABLE 37
Assay Results for ASOs based on ASO-677 different
LNA and 2′-OMe abasic monomer patterns

| | | Caspase | Caspase | | | |
|---|---|---|---|---|---|---|
| ASO-677 | | Fold over | Fold over | | | TLR8 |
| 1x LNA | | ASO-1 | ASO-1 | EC50 | CC50 | Fold over |
| walk | Position | 167 nM | 56 nM | nM | nM | ASO-1 |
| ASO-1039 | mX 11 LNA-Pos1 | 2.26 | 3.89 | 5.93 | >167 | 0.87 |
| ASO-1040 | mX 11 LNA-Pos2 | 2.34 | 3.46 | 5.56 | >167 | 1.16 |
| ASO-1041 | mX 11 LNA-Pos3 | 2.27 | 3.68 | 5.82 | >167 | 1.05 |
| ASO-1042 | mX 11 LNA-Pos4 | 2.15 | 3.21 | 5.52 | >167 | 1.13 |
| ASO-1043 | mX 11 LNA-Pos16 | 1.95 | 4.13 | 8.50 | >167 | 1.21 |
| ASO-1044 | mX 11 LNA-Pos18 | 1.78 | 3.87 | 3.38 | >167 | 0.97 |
| ASO-1045 | mX 11 LNA-Pos19 | 2.10 | 4.36 | 5.50 | >167 | 0.96 |
| ASO-1046 | mX 11 LNA-Pos20 | 2.06 | 4.26 | 5.35 | >167 | 0.99 |
| ASO-677 | mX 11 | 0.74 | 0.48 | 8.07 | >167 | 1.09 |
| ASO-1 | | 1 | 1 | 4.29 | >167 | 1 |

### Example 39: 2′,5′-Dual Modified Amidites in ASO-182

[0359] ASO-182 as described in Example 24 was modified. ASO-661 contains a 5cpG modification at position 6 and ASO-662 contains a 5mcpG modification at position 6. ASO-663 contains a 5cpG modification at position 8 and ASO-664 contains a 5mcpG modification at 8. The ASOs were subjected to the assays described in Example 2 to determine RNAse H-mediated degradation, cytotoxicity, TLR8 pathway activation, and caspase activation. Overall there is little improvement on caspase profile (Table 38).

TABLE 38
Assay Results for ASOs based on ASO-182 with 2′,5′-dual modified amidites

| | | Caspase | Caspase | | | |
|---|---|---|---|---|---|---|
| | | Fold over | Fold over | hTLR8 | | |
| | | ASO-1 | ASO-1 | fold over | HepG2.2.25 | HepG2.2.15 |
| ASO | Chem | 167 nM | 56 nM | ASO-1 | EC50 nM | CC50 nM |
| ASO-6 | Ctrl | 1.32 | 2.44 | 1.14 | 7.89 | >167 |
| ASO-182 | 2 LNA 3, 18 | 1.11 | 3.46 | 1.12 | 2.41 | >167 |
| ASO-661 | cpG 6 | 1.14 | 3.37 | 0.82 | 1.76 | >167 |
| ASO-662 | mcpG 6 | 0.80 | 1.74 | 0.85 | 2.50 | >167 |
| ASO-663 | cpG 8 | 0.80 | 1.94 | 0.83 | 2.37 | >167 |
| ASO-664 | mcpG 8 | 0.74 | 2.14 | 0.88 | 1.90 | >167 |
| ASO-1 | Ctrl | 1 | 1 | 1 | 4.46 | >167 |

### Example 40: Screening 21-Mer ASOs with Different Length Gaps and Wings

[0360] ASOs were prepared with differing length gap and wing regions. The ASOs were subjected to the assays described in Example 2 to determine RNAse H-mediated degradation, cytotoxicity, TLR8 pathway activation, and caspase activation. ASO-590, ASO-592, ASO-593, ASO-596, ASO-597, ASO-598, ASO-560, and ASO-601 exhibited improved caspase profiles but overall there is significant reduction of hTLR8 agonist activity across every ASO in this group (Table 39).

TABLE 39
Assay Results for 21-mer ASOs with different length Gaps and Wings

| | | Caspase | | | |
|---|---|---|---|---|---|
| | Caspase Fold over | Fold over | | | |
| | ASO-1 | ASO-1 | TLR8 Fold | HepG2.2.15 | HepG2.2.15 |
| ASO | 167 nM | 56 nM | Over ASO-1 | EC50 nM | CC50 nM |
| ASO-6 | 1.35 | 0.91 | 1.23 | 7.89 | >167 |
| ASO-590 | 0.68 | 0.17 | 0.46 | 9.54 | >167 |
| ASO-591 | 0.95 | 0.32 | 0.50 | 8.24 | >167 |
| ASO-592 | 0.71 | 0.18 | 0.49 | 8.18 | >167 |
| ASO-593 | 0.62 | 0.17 | 0.48 | 8.76 | >167 |
| ASO-594 | 1.20 | 0.22 | 0.63 | 6.71 | >167 |
| ASO-595 | 1.45 | 0.73 | 0.54 | 8.93 | >167 |
| ASO-596 | 0.76 | 0.18 | 0.47 | 9.27 | >167 |
| ASO-596 | 0.68 | 0.10 | 0.50 | 8.15 | >167 |
| ASO-597 | 0.78 | 0.17 | 0.52 | 10.59 | >167 |
| ASO-598 | 0.88 | 0.22 | 0.58 | 7.81 | >167 |
| ASO-600 | 0.62 | 0.14 | 0.56 | 10.10 | >167 |
| ASO-601 | 0.55 | 0.09 | 0.56 | 12.34 | >167 |
| ASO-1 | 1 | 1 | 1 | 4.46 | >167 |

### Example 41: MsPA Linker at Differing Positions in ASO-182

[0361] ASOs were prepared with a single MsPA linker at differing positions based on ASO-182. The ASOs were subjected to the assays described in Example 2 to determine RNAse H-mediated degradation, cytotoxicity, and TLR8 pathway activation. All ASO's retained hTLR8 activity (Table 40).

TABLE 40
Assay Results for ASOs based on ASO-182
with different MsPA linker positions

| | hTLR8 | | | | HepG2.2.15 | |
|---|---|---|---|---|---|---|
| | | | | | HBsAg | |
| | | | | Fold Over | EC50 | |
| ASO | 48 hrs (raw signal) | | | ASO-1 | (nM) | CC50 (nM) |
| ASO-1 | 2.23 | ± | 0.24 | 1 | 4.46 | >167 |
| ASO-6 | 2.55 | ± | 0.15 | 1.14 | 7.89 | >167 |
| ASO-182 | 2.50 | ± | 0.13 | 1.12 | 2.41 | >167 |
| ASO-641 | 2.19 | ± | 0.12 | 0.98 | 1.97 | >167 |
| ASO-642 | 2.04 | ± | 0.07 | 0.91 | 1.91 | >167 |
| ASO-643 | 2.44 | ± | 0.10 | 1.09 | 1.85 | >167 |
| ASO-644 | 2.78 | ± | 0.09 | 1.24 | 2.42 | >167 |
| ASO-645 | 2.40 | ± | 0.11 | 1.07 | 2.01 | >167 |
| ASO-646 | 2.58 | ± | 0.10 | 1.16 | 2.45 | >167 |
| ASO-647 | 2.56 | ± | 0.10 | 1.15 | 2.88 | >167 |
| ASO-648 | 2.38 | ± | 0.14 | 1.06 | 2.26 | >167 |
| ASO-649 | 1.97 | ± | 0.03 | 0.88 | 2.51 | >167 |
| ASO-650 | 2.10 | ± | 0.05 | 0.94 | 2.51 | >167 |

### Example 42:21-Mer ASOs with Differing Gap Regions Sizes in ASO-1

[0362] Additional 21-mer ASOs were prepared based on ASO-1 hotspots. ASO-629, ASO-630, ASO-631, ASO-632, ASO-633, ASO-634, ASO-635, ASO-636, ASO-637, ASO-638, ASO-639, and ASO-640 were prepared with a gap region as described in Table 41. The ASOs were subjected to the assays described in Example 2 to determine RNAse H-mediated degradation, cytotoxicity, TLR8 pathway activation, and caspase activation (Table 41).

TABLE 41
Assay Results for ASOs based on ASO-1 hotspots with differing gap region sizes

| | | Caspase | Caspase | | | |
|---|---|---|---|---|---|---|
| | | Fold over | Fold over | TLR8 | | |
| | | ASO-1 | ASO-1 | Fold Over | HepG2.2.15 | HepG2.2.15 |
| ASO | Description | 167 nM | 56 nM | ASO-1 | EC50 nM | CC50 nM |
| ASO-1 | | 1 | 1 | | 5.84 | >167 |
| ASO-629 | gapmer_4-10-7 | 0.99 | 1.76 | 0.78 | 10.86 | >167 |
| ASO-630 | gapmer 5-10-6 | 0.83 | 3.65 | 0.84 | 4.688 | >167 |
| ASO-631 | gapmer 6-10-5 | 1.09 | 4.68 | 0.93 | 5.29 | >167 |
| ASO-632 | gapmer 7-10-4 | 0.92 | 4.93 | 0.83 | 3.34 | >167 |
| ASO-633 | gapmer 4-9-8 | 0.39 | 1.14 | 0.84 | 11.47 | >167 |
| ASO-634 | gapmer 5-9-7 | 0.38 | 1.87 | 0.87 | 9.91 | >167 |
| ASO-635 | gapmer 6-9-6 | 0.91 | 4.36 | 0.92 | 8.17 | >167 |
| ASO-636 | gapmer 7-9-5 | 1.16 | 4.44 | 0.99 | 7.93 | >167 |
| ASO-637 | gapmer_8-9-4 | 1.31 | 3.44 | 0.99 | 4.07 | >167 |
| ASO-638 | gapmer 6-8-7 | 0.93 | 0.61 | 0.95 | 20.19 | >167 |
| ASO-639 | gapmer 7-8-6 | 1.01 | 2.19 | 1.01 | 10.50 | >167 |
| ASO-640 | gapmer 5-11-5 | 1.07 | 2.31 | 1.27 | 5.78 | >167 |
| ASO-635 | gapmer 6-9-6 | 0.91 | 4.36 | 0.92 | 8.17 | >167 |

### Example 43:21-Mer ASOs with Modified Wing Lengths

[0363] Additional 21-mer ASOs were prepared with modified wing lengths. ASO-776, ASO-777, ASO-778, ASO-779, ASO-780, ASO-781, ASO-782 and ASO-783, were prepared as shown in Table 1 with the wing regions as described in Table 42. The ASOs were subjected to the assays described in Example 2 to determine RNAse H-mediated degradation, cytotoxicity, TLR8 pathway activation and caspase activation. ASO-779 showed improved caspase activity, with all ASOs showing reduced hTLR8 activity as compared to controls ASO-139 and ASO-1 (Table 42)

TABLE 42
Assay Results for 21-mer ASOs with modified wing lengths

| | | Caspase | Caspase | | |
|---|---|---|---|---|---|
| | | Fold | Fold | | |
| | | over | over | | |
| | | ASO-1 | ASO-1 | EC50 | CC50 |
| ASO | Position | 167 nM | 56 nM | nM | nM |
| ASO-776 | gapmer_5-10-6 | 0.99 | 1.05 | 4.92 | >167 |
| ASO-777 | gapmer_6-10-5 | 1.24 | 1.42 | 5.34 | >167 |
| ASO-778 | gapmer_5-10-6 | 1.12 | 1.89 | 9.00 | >167 |
| ASO-779 | gapmer_6-10-5 | 0.57 | 0.32 | 5.80 | >167 |
| ASO-780 | gapmer_5-10-6 | 1.09 | 3.48 | 4.80 | >167 |
| ASO-781 | gapmer_6-10-5 | 1.12 | 3.51 | 5.66 | >167 |
| ASO-782 | gapmer_5-10-6 | 1.15 | 2.42 | 4.93 | >167 |
| ASO-783 | gapmer_6-10-5 | 1.14 | 1.58 | 3.07 | >167 |
| ASO-139 | | 1.40 | 8.78 | 1.11 | >167 |
| ASO-1 | | 1 | 1 | 4.31 | >167 |

### Example 44: Differing LNA Modification Patterns Based on ASO-139

[0364] Additional ASOs were prepared based with differing LNA modification patterns based on ASO-139 as shown in Table 43. The ASOs were subjected to the assays described in Example 2 to determine RNAse H-mediated degradation, cytotoxicity, TLR8 pathway activation and caspase activation (Table 43). Removing a LNA from ASO-139 reduced RNase H activity without significant improvements to the caspase profile (Table 43).

TABLE 43
Assay Results for ASOs based on ASO-139
with differing LNA modification patterns

| | | Caspase | Caspase | | |
|---|---|---|---|---|---|
| | | Fold | Fold | | |
| | | over | over | | |
| | | ASO-1 | ASO-1 | EC50 | CC50 |
| ASO | LNA Position | 167 nM | 56 nM | nM | nM |
| ASO-139 | 17, 19, 20 | 1.25 | 3.59 | 1.98 | >167 |
| ASO-696 | 17, 19 | 1.06 | 1.11 | 5.19 | >167 |
| ASO-697 | 17, 20 | 1.05 | 1.45 | 6.988 | >167 |
| ASO-698 | 19, 20 | 0.98 | 1.18 | 5.436 | >167 |
| ASO-699 | 17 | 0.83 | 1.02 | 9.196 | >167 |
| ASO-700 | 19 | 0.87 | 0.85 | 5.514 | >167 |
| ASO-701 | 20 | 0.99 | 1.06 | 8.283 | >167 |
| ASO-1 | | 1 | 1 | 10.3 | >167 |

### Example 45: ASOs with Multiple MsPA Backbone Modifications

[0365] ASOs were prepared with one or two MsPA linker backbone modifications as shown in Table 44. The ASOs were subjected to the assays described in Example 2 to determine RNAse H-mediated degradation, cytotoxicity, TLR8 pathway activation and caspase activation (Table 44). Several ASOs in this group such as ASO-579, ASO-581 and ASO-582 significantly improved the caspase profiles without reducing in vitro activities.

TABLE 44
Assay Results for ASOs with multiple MsPA backbone modifications

| | | Caspase | Caspase | | | |
|---|---|---|---|---|---|---|
| | | Fold over | Fold over | TLR8 | | |
| | | ASO-1 | ASO-1 | Fold Over | HepG2.2.15 | HepG2.2.15 |
| | Description | 167 nM | 56 nM | ASO-1 | EC50 nM | CC50 nM |
| ASO-579 | MsPA 6 to 7 | 0.54 | 0.36 | 1.11 | 7.71 | >167 |
| ASO-580 | MsPA 5 to 7 | 0.35 | 0.43 | 0.83 | 2.12 | 63.11 |
| ASO-581 | MsPA 6 to 8 | 0.54 | 0.15 | 0.82 | 7.19 | >167 |
| ASO-582 | MsPA 7 to 9 | 0.36 | 0.18 | 0.87 | 5.21 | >167 |
| ASO-583 | MsPA 8 to 10 | 0.22 | 0.30 | 0.92 | 7.99 | >167 |
| ASO-584 | MsPA 9 to 11 | 0.35 | 0.63 | 1.04 | 15.20 | >167 |
| ASO-585 | MsPA 10 to 12 | 0.28 | 0.26 | 0.97 | 12.78 | >167 |
| ASO-586 | MsPA 11 to 13 | 1.38 | 0.62 | 1.72 | 21.65 | >167 |
| ASO-587 | MsPA 12 to 14 | 1.53 | 0.42 | 1.00 | 15.80 | >167 |
| ASO-588 | MsPA 13 to 15 | 1.12 | 0.50 | 0.54 | 10.96 | >167 |
| ASO-589 | MsPA 14 to 16 | 1.03 | 0.56 | 1.07 | 42.78 | >167 |
| ASO-1 | | 1 | 1 | 1 | 5.84 | >167 |

### Example 46: ASOs with an Abasic Monomer 2′OMeX Modification on the 3′ Wing of ASO-1

[0366] Additional ASOs were prepared as shown in FIG. 34 using a 3′ wing abasic monomer walk based on ASO-1. The ASOs were subjected to the assays described in Example 2 to determine RNAse H-mediated degradation and cytotoxicity (Table 45). The % reduction in RNaseH activity and % viability after treatment of the ASO's at 0.1, 0.2, 1, 2, 3, 4, 5, 10, 20, 30, 100, and 200 nM was assessed (FIG. 35 and FIG. 36).

TABLE 45
Assay Results for ASOs based on ASO-1 with abasic
monomer 2′OMeX modifications at varying positions

| ASO-1 3′ wing | | EC50 | CC50 |
|---|---|---|---|
| abasic monomer walk | Position | nM | nM |
| ASO-763 | 16 | 19.97 | >167 |
| ASO-764 | 17 | 19.66 | >167 |
| ASO-765 | 18 | 17.58 | >167 |
| ASO-766 | 19 | 20.33 | >167 |
| ASO-767 | 20 | 16.529 | >167 |
| ASO-1 | | 10.33 | >167 |

### Example 47: ASOs with an LNA Mismatch Modification Based on ASO-139

[0367] ASOs were prepared as shown in Table 46 using a 3′ LNA mismatch approach. The ASOs were subjected to the assays described in Example 2 to determine RNAse H-mediated degradation and cytotoxicity (Table 46).

TABLE 46
Assay Results for ASOs based on ASO-139
with an LNA mismatch at varying positions

| | | Caspase | Caspase | | |
|---|---|---|---|---|---|
| | | Fold over | Fold over | | |
| ASO-139- 3′ | | ASO-1 | ASO-1 | EC50 | CC50 |
| LNA MisMatch | Position | 167 nM | 56 nM | nM | nM |
| ASO-754 | 17-A | 1.84 | 1.14 | 22.63 | >167 |
| ASO-768 | 17-C | 2.50 | 2.27 | 26.76 | >167 |
| ASO-769 | 17-T | 1.17 | 0.80 | 14.53 | >167 |
| ASO-770 | 19-A | 2.35 | 1.31 | 28.08 | >167 |
| ASO-771 | 19-C | 2.24 | 0.31 | 16.42 | >167 |
| ASO-772 | 19-T | 1.86 | 0.41 | 26.65 | >167 |
| ASO-773 | 20-A | 2.10 | 0.41 | 61.31 | >167 |
| ASO-774 | 20-G | 2.78 | 1.53 | 90.09 | >167 |
| ASO-775 | 20-T | 1.73 | 0.31 | 26.13 | >167 |
| ASO-139 | 17, 19, 20 | 1.92 | 1.18 | 1.98 | >167 |
| ASO-1 | | 1 | 1 | 10.3 | >167 |

### Example 48: ASOs Design with a 2′-OMe and LNA Combination Approach

[0368] ASOs were prepared using a 2′-OMe and LNA modification combination approach based on parental ASOs ASO-153, ASO-182 and ASO-183. The ASOs were subjected to the assays described in Example 2 to determine RNAse H-mediated degradation, cytotoxicity, TLR8 pathway activation and caspase activation with ASO-272 demonstrating the best in vivo profile (Table 47). Most ASOs in this group showed significant cytotoxicity.

TABLE 47
Assay Results for ASOs based on ASO-153 with a combination
of 2′-OMe and LNA modifications at varying positions

| | | | Caspase | |
|---|---|---|---|---|
| | EC50 | CC50 | Fold/ASO-1 | hTLR8 |
| ASO | nM | nM | at 167 nM | Fold/ASO-1 |
| ASO-269 | 1.707 | 38.66 | 2.2 | 1.17 |
| ASO-270 | 1.78 | 43.2 | 2.3 | 1.08 |
| ASO-271 | 2.1 | 136.99 | | 1.40 |
| ASO-272 | 2.872 | >167 | 0.90 | 1.32 |
| ASO-273 | 1.907 | 33.22 | 3.1 | 1.11 |
| ASO-274 | 1.665 | 40.07 | 1.4 | 1.07 |
| ASO-275 | 2.371 | 62.68 | 4.1 | 1.06 |
| ASO-277 | 2.515 | >167 | 2.1 | 1.13 |
| ASO-278 | 2.635 | 56.31 | 2.8 | 0.79 |
| ASO-279 | 1.467 | 45.51 | 2.9 | 0.85 |
| ASO-280 | 2.203 | >167 | 1.6 | 0.94 |
| ASO-281 | 1.531 | 66.88 | 2.3 | 1.36 |
| ASO-282 | 1.11 | 53.19 | 3.1 | 0.89 |
| ASO-283 | 0.86 | 33.51 | 3.3 | 1.00 |
| ASO-1 | 5.2 | >167 | 1.0 | 1.0 |

### Example 49: ASOs Designed with Stereodefined Dimers in the 5′ Wings

[0369] ASOs were designed with stereodefined dimers in the 5′ wings based on ASO-6 to prepare ASO-426, ASO-427, ASO-428, ASO-429, ASO-430, ASO-431, and ASO-432 (Table 1.). The ASOs were subjected to the assays described in Example 2 to determine RNAse H-mediated degradation, cytotoxicity, and TLR8 pathway activation. None of the ASOs showed improved RNase H activity while most showed significant cytotoxicity (Table 48).

TABLE 48
Assay Results for ASO's based on ASO-6 with
stereodefined dimers in the 5′ wings

| | EC50 | CC50 | hTR8 Fold |
|---|---|---|---|
| ASO | nM | nM | Over ASO-1 |
| ASO-426 | 7.16 | 38.66 | 1.16 |
| ASO-427 | 6.92 | 43.22 | 0.96 |
| ASO-428 | 6.30 | 136.99 | 1.03 |
| ASO-429 | 6.30 | >167 | 0.97 |
| ASO-430 | 5.58 | 33.21 | 0.92 |
| ASO-431 | 7.94 | 40.07 | 1.06 |
| ASO-432 | 5.95 | 62.68 | 0.89 |
| ASO-1 | 5.2 | >167 | |

### Example 50: ASOs Designed with scpBNA Modifications Based on ASO-6

[0370] ASOs were designed with scpBNA modifications based on the parental ASO, ASO-6. The ASOs were subjected to the assays described in Example 2 to determine RNAse H-mediated degradation, cytotoxicity, TLR8 pathway activation, and caspase activation, with scpBNA modifications not improving the toxicity profile (Table 49) and (Table 50). Most ASOs showed worsened cytotoxicity.

TABLE 49
Assay Results for ASOs based on ASO-6 with
scpBNA modifications at varying positions

| | | | Caspase Fold | Caspase Fold | |
|---|---|---|---|---|---|
| | EC50 | CC50 | over ASO-1 | over ASO-1 | hTLR8 Fold |
| ASO | nM | nM | 167 nM | 56 nM | Over ASO-1 |
| ASO-479 | 2.24 | >167 | 1.05 | 1.33 | 0.96 |
| ASO-480 | 2.77 | 20.26 | 1.16 | 1.51 | 1.23 |
| ASO-481 | 1.39 | 43.33 | 1.14 | 1.45 | 1.32 |
| ASO-482 | 1.39 | 58.86 | 1.10 | 1.40 | 1.06 |
| ASO-483 | 2.29 | 85.47 | 1.08 | 1.77 | 1.19 |
| ASO-484 | 2.17 | 62.26 | 1.07 | 1.75 | 1.34 |
| ASO-485 | 2.61 | >167 | 1.09 | 1.78 | 1.13 |
| ASO-486 | 3.39 | >167 | 1.16 | 1.90 | 0.67 |
| ASO-487 | 3.06 | 57.59 | 1.03 | 1.37 | 0.87 |
| ASO-488 | 10.33 | 65.16 | 1.02 | 1.29 | 0.76 |
| ASO-489 | 1.98 | >167 | 0.98 | 1.27 | 0.95 |
| ASO-490 | 2.18 | 66.73 | 1.10 | 1.54 | 0.77 |

TABLE 50
Assay Results for ASOs based on ASO-6 with
scpBNA modifications at varying positions

| | | | Caspase Fold | Caspase Fold | |
|---|---|---|---|---|---|
| | EC50 | CC50 | over ASO-1 | over ASO-1 | hTLR8 Fold |
| ASO | nM | nM | 167 nM | 56 nM | Over ASO-1 |
| ASO-492 | 1.49 | 40.34 | 1.17 | 1.63 | 1.04 |
| ASO-493 | 1.46 | 35.85 | 1.19 | 1.68 | 1.03 |
| ASO-494 | 2.33 | 83.71 | 1.08 | 1.46 | 0.94 |
| ASO-495 | 1.41 | >167 | 1.12 | 1.62 | 1.01 |
| ASO-496 | 2.43 | 68.12 | 1.01 | 1.29 | 0.82 |
| ASO-497 | 0.86 | 55.31 | 1.07 | 1.35 | 0.96 |
| ASO-498 | 2.27 | 62.37 | 1.10 | 1.38 | 1.14 |
| ASO-499 | 1.50 | 22.79 | 1.15 | 1.64 | 0.86 |
| ASO-500 | 1.49 | 52.26 | 1.14 | 1.56 | 0.63 |
| ASO-501 | 1.923 | 102.39 | 1.01 | 1.27 | 1.04 |
| ASO-502 | 1.55 | 55.12 | 1.09 | 1.51 | 1.04 |
| ASO-1 | 5.427 | >167 | 1 | 1 | 1 |

### Example 51: ASOs Designed with scpBNA Modifications and LNA Modifications

[0371] ASOs were designed with scpBNA and LNA modifications. The ASOs were subjected to the assays described in Example 2 to determine RNAse H-mediated degradation, cytotoxicity, TLR8 pathway activation, and caspase activation, with scpBNA and LNA modifications not improving the toxicity profile (Table 51).

TABLE 51
Assay Results for ASOs with scpBNA and
LNA modifications at varying positions

| | | | Caspase Fold | Caspase Fold | |
|---|---|---|---|---|---|
| | EC50 | CC50 | over ASO-1 | over ASO-1 | hTR8 Fold |
| ASO | nM | nM | 167 nM | 56 nM | Over ASO-1 |
| ASO-503 | 7.16 | >167 | 1.15 | 1.53 | 1.13 |
| ASO-504 | 6.92 | >167 | 1.09 | 1.41 | 1.23 |
| ASO-505 | 6.30 | >167 | 1.12 | 1.44 | 1.21 |
| ASO-506 | 6.30 | >167 | 1.07 | 1.35 | 1.13 |
| ASO-507 | 5.58 | >167 | 1.17 | 1.07 | 1.23 |
| ASO-508 | 7.94 | >167 | 1.13 | 1.39 | 1.08 |
| ASO-1 | 5.427 | >167 | 1 | 1 | 1 |

### Example 52: ASOs Designed with ocp/omcp/xylo Modification in the Gap Region

[0372] ASOs were designed with ocp, omcp, or xylo modification in the gap region as shown in Table 1. The ASO's were subjected to the assays described in Example 2 to determine RNAse H-mediated degradation, cytotoxicity, TLR8 pathway activation, and caspase activation, with ocp, omcp, and xylo modifications showing improved safety profile but not improving RNase H activity (modifications not improving the toxicity profile (Table 52).

TABLE 52
Assay Results for ASOs with ocp/omcp/xylo
modification in the gap region

| | | | Caspase Fold | Caspase Fold | |
|---|---|---|---|---|---|
| | EC50 | CC50 | over ASO-1 | over ASO-1 | hTR8 Fold |
| ASO | nM | nM | 167 nM | 56 nM | Over ASO-1 |
| ASO-300 | 160.31 | >167 | 0.56 | 0.88 | 0.55 |
| ASO-301 | 166.4 | >167 | 0.50 | 0.74 | 0.97 |
| ASO-302 | 76.04 | >167 | 0.53 | 0.82 | 1.09 |
| ASO-303 | 164.94 | >167 | 0.48 | 0.68 | 0.95 |
| ASO-304 | 164.06 | >167 | 0.51 | 0.77 | 0.82 |
| ASO-305 | 164.58 | >167 | 0.56 | 0.84 | 0.92 |
| ASO-306 | 162.87 | >167 | 0.52 | 0.81 | 0.75 |
| ASO-307 | 166.33 | >167 | 0.56 | 0.88 | 1.43 |
| ASO-308 | 14.95 | >167 | 0.83 | 1.05 | 1.23 |
| ASO-1 | 7.29 | >167 | 1 | 1 | 1 |

### Example 53: ASOs Designed with Stereo-Defined R—PS Backbone Based on ASO-6

[0373] ASOs were designed with a stereo-defined R—PS modification based on ASO-6. The ASOs were subjected to the assays described in Example 2 to determine RNAse H-mediated degradation, cytotoxicity, TLR8 pathway activation, and caspase activation, with stereo-defined R—PS backbone modification showing no significant change (Table 53).

TABLE 53
Assay Results for ASOs based on ASO-6 with stereo-defined
R-PS backbone modifications at varying positions

| | | | Caspase Fold | Caspase Fold | |
|---|---|---|---|---|---|
| | EC50 | CC50 | over ASO-1 | over ASO-1 | hTR8 Fold |
| ASO | nM | nM | 167 nM | 56 nM | Over ASO-1 |
| ASO-6 | 5.49 | >167 | 0.99 | 1.03 | 1.17 |
| ASO-227 | 6.47 | >167 | 0.99 | 0.99 | 1.23 |
| ASO-228 | 8.42 | >167 | 0.98 | 1.11 | 1.18 |
| ASO-229 | 9.54 | >167 | 0.92 | 1.02 | 1.23 |
| ASO-230 | 6.7 | >167 | 0.95 | 1.18 | 1.19 |
| ASO-231 | 9.44 | >167 | 0.96 | 1.11 | 1.26 |
| ASO-232 | 9.52 | >167 | 1.07 | 1.13 | 1.21 |
| ASO-233 | 9.09 | >167 | 1.11 | 1.17 | 1.20 |
| ASO-234 | 6.31 | >167 | 1.14 | 1.24 | 1.10 |
| ASO-235 | 7.35 | >167 | 1 | 1.15 | 1.42 |
| ASO-236 | 11.26 | >167 | 0.97 | 1.15 | 1.28 |
| ASO-247 | 11.84 | >167 | 1.12 | 1.19 | 1.25 |
| ASO-248 | 9.94 | >167 | 1.18 | 1.26 | 1.22 |
| ASO-1 | 7.29 | >167 | 1 | 1 | 1 |

### Example 54: ASOs Designed with scpBNA Modifications Based on ASO-144 or ASO-222

[0374] ASOs were designed with a scpBNA modification based on ASO-144 or ASO-222 as shown in Table 1 for ASO-144 and Table 54 and for ASO-222. The ASOs were subjected to the assays described in Example 2 to determine caspase activation. ASOs based on ASO-144 did not show an improved profile (Table 54). When scpBNA replaces LNA modifications, there is no improvement in the toxicity profile (Table 55).

TABLE 54
Assay Results for ASOs based on ASO-144 with
scpBNA modifications at varying positions

| | Caspase Fold | Caspase Fold |
|---|---|---|
| | over ASO-1 | over ASO-1 |
| ASO | 167 nM | 56 nM |
| ASO-433 | 1.48 | 2.55 |
| ASO-434 | 1.85 | 5.06 |
| ASO-435 | 1.52 | 4.65 |
| ASO-436 | 1.56 | 3.59 |
| ASO-437 | 1.49 | 3.59 |
| ASO-438 | 1.75 | 4.05 |
| ASO-439 | 1.68 | 4.15 |
| ASO-440 | 1.59 | 5.10 |
| ASO-441 | 2.87 | 6.39 |
| ASO-442 | 1.81 | 3.62 |
| ASO-443 | 1.91 | 3.13 |
| ASO-444 | 1.85 | 3.68 |
| ASO-445 | 1.59 | 3.85 |
| ASO-446 | 2.24 | 2.93 |
| ASO-447 | 2.57 | 2.44 |
| ASO-448 | 2.27 | 4.90 |
| ASO-449 | 1.59 | 3.69 |
| ASO-450 | 2.15 | 4.81 |
| ASO-451 | 2.10 | 5.06 |
| ASO-452 | 1.77 | 5.08 |
| ASO-453 | 1.55 | 3.50 |
| ASO-454 | 1.81 | 4.28 |
| ASO-455 | 1.84 | 3.11 |
| ASO-456 | 1.64 | 3.68 |
| ASO-1 | 1 | 1 |

TABLE 55
Assay Results for ASOs based on ASO-222 with
scpBNA modifications at varying positions

| | Caspase Fold | Caspase Fold |
|---|---|---|
| | over ASO-1 | over ASO-1 |
| ASO | 167 nM | 56 nM |
| ASO-457 | 1.36 | 2.64 |
| ASO-458 | 1.31 | 3.28 |
| ASO-459 | 1.45 | 3.27 |
| ASO-460 | 1.33 | 2.29 |
| ASO-461 | 1.31 | 2.89 |
| ASO-462 | 1.99 | 4.34 |
| ASO-1 | 1 | 1 |

### Example 55: ASOs Designed with LNA Walk Based on ASO-1

[0375] ASOs were designed using an LNA walk based on the parental strain ASO-1. The ASOs were subjected to the assays described in Example 2 to determine RNAse H-mediated degradation, cytotoxicity, TLR8 pathway activation, and caspase activation. ASO-510, ASO-514, ASO-528, and ASO-532, improved efficacy and safety as compared to ASO-1, however most ASOs showed significant reduction of hTLR8 agonist activity (Table 56).

TABLE 56
Assay Results for ASOs based on ASO-1 with
LNA modifications at varying positions

| | | | Caspase Fold | Caspase Fold | |
|---|---|---|---|---|---|
| | EC50 | CC50 | over ASO-1 | over ASO-1 | hTLR8 Fold |
| ASO | nM | nM | 167 nM | 56 nM | Over ASO-1 |
| ASO-4 | 14.06 | >167 | 0.60 | 1.10 | 0.69 |
| ASO-509 | 12.04 | >167 | 0.65 | 0.59 | 0.51 |
| ASO-510 | 7.18 | >167 | 0.16 | 0.50 | 0.43 |
| ASO-511 | 10.77 | >167 | 0.42 | 0.97 | 0.45 |
| ASO-512 | 5.38 | >167 | 0.77 | −0.22 | 0.44 |
| ASO-513 | 11.80 | >167 | 0.82 | 0.58 | 0.45 |
| ASO-514 | 4.32 | >167 | 0.30 | 0.37 | 0.47 |
| ASO-515 | 5.20 | >167 | 1.02 | 1.41 | 0.51 |
| ASO-516 | 6.30 | >167 | 0.71 | 0.34 | 0.49 |
| ASO-517 | 3.49 | >167 | 1.64 | 1.73 | 0.54 |
| ASO-518 | 13.21 | >167 | 2.66 | 5.00 | 0.45 |
| ASO-519 | 2.71 | >167 | 1.42 | 1.77 | 0.42 |
| ASO-520 | 2.00 | >167 | 1.70 | 2.36 | 0.55 |
| ASO-521 | 2.08 | >167 | 2.5 | 2.9 | 0.50 |
| ASO-522 | 1.51 | >′167 | 2.2 | 2.5 | 0.46 |
| ASO-523 | 4.78 | >′167 | 1.9 | 1.4 | 0.46 |
| ASO-524 | 14.64 | >′167 | 0.8 | 0.6 | 0.47 |
| ASO-525 | 18.70 | >′167 | 1.21 | 0.58 | 0.53 |
| ASO-526 | 8.30 | >′167 | 1.26 | 0.83 | 0.46 |
| ASO-527 | 5.06 | >′167 | 1.34 | 0.50 | 0.43 |
| ASO-528 | 5.41 | >′167 | 0.57 | 0.69 | 0.45 |
| ASO-529 | 6.00 | >′167 | 0.75 | 0.57 | 0.45 |
| ASO-530 | 9.22 | >′167 | 1.08 | 0.16 | 0.41 |
| ASO-531 | 5.63 | >′167 | 0.88 | 0.63 | 0.44 |
| ASO-532 | 5.45 | >′167 | 0.47 | 0 | 0.39 |
| ASO-533 | 7.13 | >′167 | 2.08 | 0.51 | 0.45 |
| ASO-534 | 3.92 | >′167 | 2.06 | 1.12 | 0.44 |
| ASO-535 | 4.85 | >′167 | 1.65 | 0.63 | 0.43 |
| ASO-1 | 4.94 | >′167 | 1 | 1 | 1 |

### Example 56: ASOs Designed with Luxna Modifications in the Gap Region Based on ASO-174

[0376] ASO's were designed with a Luxna modification in the gap region based on ASO-174. The ASO's were subjected to the assays described in Example 2 to determine RNAse H-mediated degradation, cytotoxicity, and caspase activation. Most ASOs in this group showed worse in vitro toxicity. ASO-540 reduced toxicity but became inactive (Table 57).

TABLE 57
Assay Results for ASOs based on ASO-174 with
Luxna modifications in the gap region

| | | | Caspase Fold | Caspase Fold |
|---|---|---|---|---|
| | EC50 | CC50 | over ASO-1 | over ASO-1 |
| ASO | nM | nM | 167 nM | 56 nM |
| ASO-174 | 2.39 | >167 | 2.14 | 3.61 |
| ASO-536 | 1.95 | 80.46 | 1.53 | 4.09 |
| ASO-537 | 2.13 | 165.93 | 1.58 | 3.95 |
| ASO-538 | 2.67 | >167 | 1.53 | 3.61 |
| ASO-539 | 2.55 | >167 | 1.81 | 2.41 |
| ASO-540 | >167 | >167 | 0 | 0 |
| ASO-541 | 5.89 | >167 | 1.64 | 2.84 |
| ASO-542 | 3.77 | >167 | 2.20 | 3.47 |
| ASO-543 | 2.05 | >167 | 1.77 | 3.01 |
| ASO-544 | 3.95 | >167 | 1.53 | 2.75 |
| ASO-1 | 4.94 | >167 | 1 | 1 |

### Example 57: ASOs Designed with Stereo-Defined S and R—PS Backbone at 3′ End Flanks Based on ASO-6

[0377] ASOs were designed with a stereo-defined R—PS modification or S—PS modification at the 3′ end flanks based on ASO-6. The ASOs were subjected to the assays described in Example 2 to determine TLR8 pathway activation and caspase activation, with ASO-463, ASO-464, ASO-466, and ASO-469, showing significantly improved in vitro safety profiles (Table 58).

TABLE 58
Assay Results for ASOs based on ASO-6 with stereo-
defined S and R-PS backbone at 3′ end flanks

| | Caspase Fold | Caspase Fold | |
|---|---|---|---|
| | over ASO-1 | over ASO-1 | hTLR8 Fold |
| ASO | 167 nM | 56 nM | Over ASO-1 |
| ASO-463 | 0.43 | 0.04 | 1.04 |
| ASO-464 | 0.63 | 0.82 | 1.13 |
| ASO-465 | 0.70 | 2.34 | 0.94 |
| ASO-466 | 0.64 | 0.86 | 0.99 |
| ASO-467 | 0.67 | 1.78 | 0.96 |
| ASO-468 | 0.77 | 2.35 | 0.90 |
| ASO-469 | 0.64 | 0.64 | 0.85 |
| ASO-1 | 1 | 1 | 1 |

### Example 58: ASOs Designed with 2′-omcp Modification in Position 6 and/or 8

[0378] ASOs were designed with a 2omcp modification in position 6, position 8, or position 6 and 8 in the parental strains ASO-174, ASO-176, and ASO-182. The ASOs were subjected to the assays described in Example 2 to determine TLR8 pathway activation and caspase activation, with ASO-475 showing an improved profile (Table 59).

TABLE 59
Assay Results for ASOs based on ASO-174, ASO-176, and ASO-
182 with 2′-omcp modification in position 6 and/or 8

| | Caspase Fold | Caspase Fold | |
|---|---|---|---|
| | over ASO-1 | over ASO-1 | hTLR8 Fold |
| Description | 167 nM | 56 nM | Over ASO-1 |
| ASO-470 | 1.28 | 6.20 | 1.18 |
| ASO-471 | 0.78 | 4.43 | 0.95 |
| ASO-472 | 0.59 | 1.69 | 0.80 |
| ASO-473 | 0.99 | 4.89 | 0.86 |
| ASO-474 | 0.85 | 2.63 | 0.78 |
| ASO-475 | 0.54 | 0.81 | 0.72 |
| ASO-476 | 1.25 | 4.92 | 0.90 |
| ASO-477 | 0.64 | 1.51 | 1.24 |
| ASO-478 | 1.08 | 3.06 | 1.13 |
| ASO-1 | 1 | 1 | |

### Example 59: ASOs 2′-OMe Abasic Monomer in the Gap and LNA Modifications in Varying Positions

[0379] To assess the effect of 2′-OMe abasic monomer and LNA modifications, ASO-1 was used as the parental ASO and ASO-676, ASO-677, ASO-1036, and ASO-1037 were prepared (FIG. 37).

[0380] The ASOs were subjected to the assays described in Example 2 to determine RNAse H-mediated degradation, cytotoxicity, TLR8 pathway activation, and caspase activation as compared to controls ASO-1 and ASO-139 (Table 60 and Table 61).

[0381] All ASOs show improved caspase profiles and hTLR8 binding activity compared to ASO-1 and ASO-139 (Table 60 and Table 61). ASO-1036 and ASO-1037 showed improved RNase H activity as compared to ASO-1 (Table 61). All ASOs showed better in vivo potency than ASO-1 in reducing HBsAg levels in plasma and there was no ALT elevation for any ASO (FIG. 38, FIG. 39, FIG. 41, FIG. 42, FIG. 43, FIG. 44, FIG. 50, and FIG. 51). ASO-676 showed increased tissue concentration in the liver and improved liver-to-kidney ratio relative to ASO-1 and ASO-139 (FIG. 40). ASO-676 showed similar cytokine profile in hTLR8 knock in mice plasma and liver relative to ASO-1 (FIG. 52). ASO-677 did not result in significantly different cytokine profile relative to ASO-1 (FIG. 63).

TABLE 60
Assay Results for ASOs based on ASO-1 with 2′-
OMe abasic monomer modification at position 10 or 11

| | | | | | | Caspase 3/7 | |
|---|---|---|---|---|---|---|---|
| | | hTLR8 | hTLR8 | | | Fold | Fold |
| | | Fold | Binding | HepG2.2.15 | | over | over |
| | Modifi- | Over | Kd | EC50 | CC50 | ASO-1 | ASO-1 |
| | cation | ASO-1 | (nM) | (nM) | (nM) | 167 nM | 56 nM |
| ASO-1 | | 1 | 1.07 | 8.6 | >167 | 1 | 1 |
| ASO-676 | mX 10 | 0.88 | — | 15.08 | >167 | 0.68 | 0.34 |
| ASO-677 | mX 11 | 0.95 | 1.58 | 9.2 | >167 | 0.58 | 0.34 |

TABLE 61
Assay Results for ASOs based on ASO-1 with 2′-OMe
abasic monomer modification at position 11 and
LNA modifications at positions 18, 19, or 20

| | | Caspase | Caspase | | | TLR8 |
|---|---|---|---|---|---|---|
| | | Fold over | Fold over | | | Fold |
| | | ASO-1, | ASO-1, | EC50 | CC50 | over |
| ASO | Position | 167 nM | 56 nM | nM | nM | ASO-1 |
| ASO-1 | | 1 | 1 | 8.6 | >167 | 1 |
| ASO-139 | LNA 17, | 1.9 | 1.36 | 1.8 | >167 | 0.8 |
| | 19, 20 | | | | | |
| ASO-1036 | mX 11 LNA | 0.65 | 0.40 | 1.08 | >167 | 1.00 |
| | 18, 19 | | | | | |
| ASO-1037 | mX 11 LNA | 0.76 | 0.58 | 2.39 | >167 | 1.07 |
| | 18, 20 | | | | | |

### Example 60: ASOs 2′-Deoxy Abasic Monomer in the Gap and LNA Modifications in Varying Positions

[0382] To assess the effect of 2′-deoxy abasic monomers and LNA modifications, ASO-1 was used as the parental ASO and ASO-707, ASO-1191, ASO-1192, and ASO-1193 were prepared (FIG. 37). Additional ASOs based on the parental construct ASO-707, including those shown in FIGS. 27 and 59, were tested as well. The ASOs were subjected to the assays described in Example 2 to determine RNAse H-mediated degradation, cytotoxicity, TLR8 pathway activation, and caspase activation as compared to controls ASO-1 and ASO-139 (see Tables 62-65).

[0383] All ASOs show improved caspase profiles compared to ASO-1 and ASO-139 (Table 62 and Table 63). ASO-1191, ASO-1192 and ASO-1193 showed improved RNase H activity as compared to ASO-1 (Table 63). ASO-707, ASO-1191, ASO-1192 and ASO-1193 showed better in vivo potency in AAV-HBV mouse model than ASO-1. ASO-1191, ASO-1192 and ASO-1193 also showed better in vivo potency in AAV-HBV mouse model than ASO-139 (FIG. 45, FIG. 48, FIG. 53, and FIG. 56). ASO-707 showed increased tissue concentration in the liver and improved liver-to-kidney ratio relative to ASO-1 and ASO-139 (FIG. 47). ASO-1191 and ASO-1193 showed similar cytokine induction profiles to ASO-1 (FIG. 55 and FIG. 58).

TABLE 62
Assay Results for ASOs based on ASO-1 with 2′-deoxy
Abasic monomer modification at position 11

| | | Caspase | Caspase | | | | |
|---|---|---|---|---|---|---|---|
| | | Fold | Fold | hTLR8 | | | |
| | | over | over | Fold | hTLR8 | | |
| | | ASO-1 | ASO-1 | over | kD | EC50 | CC50 |
| ASO | Position | 167 nM | 56 nM | ASO-1 | (nM) | (nM) | (nM) |
| ASO-707 | 11 | 0.73 | 0.53 | 0.94 | 0.139 | 19.16 | >167 |
| ASO-1 | N/A | 1 | 1 | 1 | 0.5 | 7.02 | >167 |

TABLE 63
Assay Results for ASOs based on ASO-1 with 2′-deoxy
Abasic monomer modification at position 11 and
LNA modifications at positions 18, 19, or 20

| | | Caspase | Caspase | | | |
|---|---|---|---|---|---|---|
| | | Fold | Fold | | | TLR8 |
| | | over | over | | | Fold |
| | | ASO-1, | ASO-1, | EC50 | CC50 | over |
| ASO | Position | 167 nM | 56 nM | nM | nM | ASO-1 |
| ASO-1 | | 1 | 1 | 8.6 | >167 | 1 |
| ASO-139 | LNA 17, 19, 20 | 1.9 | 1.36 | 1.8 | >167 | 0.8 |
| ASO-1191 | dX 11 LNA 5, 18 | 0.79 | 0.63 | 2.68 | >167 | 1.06 |
| ASO-1192 | dX 11 LNA 18, | 0.59 | 0.61 | 2.83 | >167 | 0.91 |
| | 19 | | | | | |
| ASO-1193 | dX 11 LNA 2, 16 | 0.64 | 0.57 | 2.65 | >167 | 0.91 |

TABLE 64
Assay Results for ASOs based on ASO-
707 with various LNA modifications

| | | Caspase | Caspase | | | hTLR8 |
|---|---|---|---|---|---|---|
| | | Fold | Fold | | | Activity |
| | | over | over | | | Fold |
| Compound | | ASO-1 | ASO-1 | EC50 | CC50 | Over |
| ID | Design | 167 nM | 56 nM | (nM) | (nM) | ASO-1 |
| ASO-1 | | 1 | 1 | 4.02 | >167 | 1.00 |
| ASO-707 | dX11 | 0.78 | 0.88 | 11.67 | >167 | 1.03 |
| ASO-1167 | LNA 3 and 5 | 0.73 | 0.56 | 2.24 | >167 | 1.07 |
| ASO-1168 | LNA 4 and 5 | 0.83 | 0.81 | 5.75 | >167 | 1.09 |
| ASO-1169 | LNA 4 and 16 | 0.73 | 0.67 | 7.88 | >167 | 1.11 |
| ASO-1170 | LNA 5 and 16 | 0.64 | 0.82 | 6.93 | >167 | 1.05 |
| ASO-1171 | LNA 5 and 19 | 0.63 | 0.75 | 4.56 | >167 | 0.93 |
| ASO-1172 | LNA 16 and 18 | 0.30 | 0.00 | 7.36 | >167 | 1.08 |

TABLE 65
Assay Results for ASOs based on ASO-
707 with various LNA modifications

| | | Caspase | Caspase | | | |
|---|---|---|---|---|---|---|
| | | Fold | Fold | | | TLR8 |
| | | over | over | | | Fold |
| Compound | | ASO-1 | ASO-1 | EC50 | CC50 | over |
| ID | Design | 167 nM | 56 nM | (nM) | (nM) | ASO-1 |
| ASO-1 | | 1 | 1 | 5.01 | >167 | 1.00 |
| ASO-139 | | 0.91 | 1.01 | 0.85 | >167 | 0.79 |
| ASO-707 | ASO-1_dX-11 | 0.04 | 0.72 | 14.24 | >167 | 1.03 |
| ASO-1196 | ASO-1dX 11 | 0.79 | 0.47 | 4.74 | >167 | 1.13 |
| | LNA 2 16 | | | | | |
| ASO-1191 | ASO-1 dX 11 | 0.79 | 0.63 | 2.68 | >167 | 1.06 |
| | LNA 5 18 | | | | | |
| ASO-1197 | ASO-1 dX 11 | 0.72 | 0.51 | 2.85 | >167 | 1.03 |
| | LNA 3 18 | | | | | |
| ASO-1198 | ASO-1 dX 11 | 0.01 | 0.62 | 5.22 | >167 | 0.90 |
| | LNA 16 19 | | | | | |
| ASO-1192 | ASO-1 dX 11 | 0.59 | 0.61 | 2.83 | >167 | 0.91 |
| | LNA 18 19 | | | | | |
| ASO-1193 | ASO-1 dX 11 | 0.64 | 0.57 | 2.65 | >167 | 0.81 |
| | LNA 18 20 | | | | | |
| ASO-1199 | ASO-1 dX 11 | 0.75 | 0.54 | 2.88 | >167 | 0.92 |
| | LNA 4 18 | | | | | |

[0384] As shown in Table 65, hTLR8 activity in ASOs with two LNAs was retained, while RNaseH mediated activities were improved relative to the parental construct ASO-707. Both ASO-707 and the variants with different LNA patterns displayed better in vitro safety profiles than ASO-1.

### Example 61: ASOs 2′-Deoxy Abasic Monomer in the Gap and LNA Modifications in Varying Positions

[0385] To assess the effect of 2′-deoxy abasic monomers and LNA modifications, ASO-707 was used as the parental ASO and variants were prepared by performing an “LNA walk” to test the impact of one or two LNA nucleotides at various positions (FIGS. 60-62). The ASOs were subjected to the assays described in Example 2 to determine RNAse H-mediated degradation, cytotoxicity, TLR8 pathway activation, and caspase activation as compared to controls ASO-1 and ASO-139 (see Tables 66-68).

TABLE 66
Assay Results for ASOs based on ASO-707 with a 1x LNA walk

| | | Caspase | Caspase | | | |
|---|---|---|---|---|---|---|
| | | Fold over | Fold over | | | TLR8 |
| Compound | | ASO-1 | ASO-1 | EC50 | CC50 | Fold over |
| ID | Design | 167 nM | 56 nM | (nM) | (nM) | ASO-1 |
| ASO-1 | | 1 | 1 | 5.01 | >167 | 1.00 |
| ASO-139 | | 0.91 | 1.01 | 0.85 | >167 | 0.79 |
| ASO-707 | ASO-1_dX-11 | 0.04 | 0.72 | 14.24 | >167 | 1.03 |
| ASO-1200 | dX 11_LNA-Pos1 | 0.98 | 0.86 | 7.44 | >167 | 0.80 |
| ASO-1201 | dX 11_LNA-Pos2 | 1.00 | 0.97 | 4.88 | >167 | 0.90 |
| ASO-1202 | dX 11_LNA-Pos3 | 0.97 | 0.95 | 9.60 | >167 | 0.92 |
| ASO-1203 | dX 11_LNA-Pos4 | 0.95 | 0.91 | 7.11 | >167 | 0.97 |
| ASO-1204 | dX 11_LNA-Pos5 | 0.84 | 1.00 | 8.32 | >167 | 0.86 |
| ASO-1205 | dX 11_LNA-Pos16 | 0.15 | 1.02 | 10.03 | >167 | 0.91 |
| ASO-1206 | dX 11_LNA-Pos17 | 0.11 | 0.95 | 9.68 | >167 | 0.81 |
| ASO-1207 | dX 11_LNA-Pos18 | 0.14 | 0.85 | 4.59 | >167 | 0.97 |
| ASO-1208 | dX 11_LNA-Pos19 | 0.17 | 0.90 | 8.19 | >167 | 0.90 |
| ASO-1209 | dX 11_LNA-Pos20 | 0.14 | 0.96 | 7.41 | >167 | 0.94 |

[0386] As shown in Table 66, hTLR8 activity was similar across the 1×LNA walk, but RNaseH mediated activities in the ASOs containing an LNA were improved relative to the parental ASO, ASO-707. Caspase activities for the tested ASOs were similar or reduced relative to ASO-1.

TABLE 67
Assay Results for ASOs based on ASO-707 with a 2x LNA walk

| | | Caspase | Caspase | | | hTLR8 |
|---|---|---|---|---|---|---|
| | | Fold over | Fold over | | | Activity |
| Compound | | ASO-1 | ASO-1 | EC50 | CC50 | Fold Over |
| ID | Design | 167 nM | 56 nM | (nM) | (nM) | ASO-1 |
| ASO-1 | | 1 | 1 | 5.01 | >167 | 1.00 |
| ASO-139 | | 0.91 | 1.01 | 0.85 | >167 | 0.79 |
| ASO-707 | dX-11 | 0.04 | 0.72 | 14.24 | >167 | 1.03 |
| ASO-1210 | dX 11 LNA 12 | 0.78 | 0.47 | 4.26 | >167 | 0.76 |
| ASO-1211 | dX 11 LNA 1 3 | 0.83 | 0.32 | 6.66 | >167 | 0.71 |
| ASO-1212 | dX 11 LNA 1 4 | 0.73 | 0.41 | 6.64 | >167 | 0.77 |
| ASO-1213 | dX 11 LNA 1 5 | 0.82 | 0.75 | 5.3 | >167 | 0.75 |
| ASO-1214 | dX 11 LNA 1 16 | 0.84 | 0.62 | 10.31 | >167 | 0.78 |
| ASO-1215 | dX 11 LNA 1 17 | 0.84 | 0.43 | 8.41 | >167 | 0.87 |
| ASO-1216 | dX 11 LNA 1 18 | 0.81 | 0.42 | 5.28 | >167 | 0.83 |
| ASO-1217 | dX 11 LNA 1 19 | 0.78 | 0.34 | 7.11 | >167 | 0.80 |
| ASO-1218 | dX 11 LNA 1 20 | 0.79 | 0.40 | 6.37 | >167 | 0.85 |
| ASO-1219 | dX 11 LNA 2 3 | 0.95 | 0.35 | 5.46 | >167 | 0.96 |

[0387] As shown in Table 67, hTLR8 activity was reduced in most ASOs with two LNAs regardless of position, and improvements in RNaseH activity relative to ASO-707 were observed. Caspase 3/7 activity also improved relative to ASO-1.

TABLE 68
Assay Results for ASOs based on ASO-707 with a 2x LNA walk

| | | Caspase | Caspase | | | |
|---|---|---|---|---|---|---|
| | | Fold over | Fold over | | | TLR8 |
| Compound | | ASO-1 | ASO-1 | EC50 | CC50 | Fold over |
| ID | Design | 167 nM | 56 nM | (nM) | (nM) | ASO-1 |
| ASO-1 | | 1 | 1 | 3.87 | >167 | 1.00 |
| ASO-139 | | 0.91 | 1.01 | 0.99 | >167 | 0.77 |
| ASO-707 | dX-11 | 0.58 | 0.49 | 13.86 | >167 | 0.96 |
| ASO-1220 | dX 11 LNA 2 4 | 0.75 | 1.08 | 6.19 | >167 | 0.90 |
| ASO-1221 | dX 11 LNA 2 5 | 0.98 | 1.46 | 5.56 | >167 | 0.86 |
| ASO-1222 | dX 11 LNA 2 17 | 0.47 | 0.66 | 6.90 | >167 | 0.88 |
| ASO-1223 | dX 11 LNA 2 18 | 0.63 | 1.45 | 4.74 | >167 | 0.67 |
| ASO-1224 | dX 11 LNA 2 19 | 0.61 | 0.60 | 5.69 | >167 | 0.69 |
| ASO-1225 | dX 11 LNA 2 20 | 0.71 | 0.88 | 5.15 | >167 | 0.67 |
| ASO-1226 | dX 11 LNA 3 4 | 0.82 | 0.75 | 7.42 | >167 | 0.82 |
| ASO-1227 | dX 11 LNA 3 16 | 0.72 | 0.91 | 8.58 | >167 | 0.84 |
| ASO-1228 | dX 11 LNA 3 17 | 0.59 | 0.78 | 8.44 | >167 | 0.74 |
| ASO-1229 | dX 11 LNA 3 19 | 0.67 | 0.72 | 5.47 | >167 | 0.75 |

[0388] As shown in Table 68, hTLR8 activity was reduced in most ASOs with two LNAs regardless of position, and improvements in RNaseH activity relative to ASO-707 were observed. Caspase 3/7 activity was generally similar to ASO-707 and better than ASO-1.

[0389] Activity screening was also performed for ASO-1230, ASO-1231, ASO-1232, ASO-1233, ASO-1234, ASO-1235, ASO-1236, ASO-1237, ASO-1238, and ASO-1239, and similar results were obtained to other ASO variants of ASO-707 containing 2 LNAs. Namely, as shown in Table 69, hTLR8 activity was similar reduced relatively to ASO-707, and similar or reduced RNaseH activity was observed. All of these ASO variants had improved (i.e., reduced) caspase activity, with ASO-1232 having the lowest caspase 3/7 activity.

TABLE 69
Assay Results for ASOs based on ASO-707 with a 2x LNA walk

| | | Caspase | Caspase | | | |
|---|---|---|---|---|---|---|
| | | Fold over | Fold over | | | TLR8 |
| Compound | | ASO-1 | ASO-1 | EC50 | CC50 | Fold over |
| ID | Design | 167 nM | 56 nM | (nM) | (nM) | ASO-1 |
| ASO-1 | | 1 | 1 | 5.05 | >167 | 1.00 |
| ASO-139 | | 0.91 | 1.01 | 0.53 | >167 | 0.76 |
| ASO-707 | dX-11 | 0.74 | 0.35 | 15.50 | >167 | 0.98 |
| ASO-1230 | dX 11 LNA 3 20 | 0.49 | 0.29 | 9.58 | >167 | 0.86 |
| ASO-1231 | dX 11 LNA 4 17 | 0.34 | 0.24 | 21.68 | >167 | 1.17 |
| ASO-1232 | dX 11 LNA 4 19 | 0.15 | 0.22 | 53.48 | >167 | 1.08 |
| ASO-1233 | dX 11 LNA 4 20 | 0.68 | 0.42 | 9.77 | >167 | 0.84 |
| ASO-1234 | dX 11 LNA 5 17 | 0.57 | 0.43 | 10.34 | >167 | 0.81 |
| ASO-1235 | dX 11 LNA 16 20 | 0.43 | 0.31 | 14.95 | >167 | 0.92 |
| ASO-1236 | dX 11 LNA 17 18 | 0.39 | 0.25 | 16.02 | >167 | 0.80 |
| ASO-1237 | dX 11 LNA 17 19 | 0.33 | 0.21 | 17.52 | >167 | 0.77 |
| ASO-1238 | dX 11 LNA 17 20 | 0.40 | 0.33 | 22.69 | >167 | 0.81 |
| ASO-1239 | dX 11 LNA 19 20 | 0.45 | 0.39 | 10.98 | >167 | 0.91 |

### Example 62: Assessment of Conjugated and Unconjugated ASO In Vivo

[0390] The effect of LNA modified mono-GalNAc conjugated and unconjugated ASOs on HBsAg levels in plasma was evaluated in an AAV-HBV C57BL/6 mouse model essentially as described in Example 25, but only for a 7 day time course. Mice were injected with 25 mg/kg on day 0, and plasma was collected and tested for HBsAg on day 7 (see FIGS. 64-66).

[0391] As shown in FIG. 64, ASO-1166, ASO-1179, and ASO-1181 showed significantly improved in vivo potency relative to ASO-1 and ASO-139, thus showing that a mono-GalNAC can improve potency. However, FIG. 65 shows that even without a GalNAc, as ASO-1024 showed modestly improved in vivo potency relative to ASO-1 and ASO-139. ASO-1169 also showed modestly improved in vivo potency relative to ASO-1 and ASO-139. Finally, FIG. 66 shows ASO-1191, ASO-1197, ASO-1192, and ASO-1193 all outperformed the reference ASOs (ASO-1 and ASO-139) despite not containing a GalNAc.

### Example 63: ASOs 2′-Deoxy Abasic Monomer in the Gap and LNA Modifications in Wings

[0392] To assess the effect of 2′-deoxy abasic monomers and LNA modifications in each wing, ASO-1196 and ASO-1197 were prepared and subjected to the assays described in Example 2 to determine RNAse H-mediated degradation, cytotoxicity, TLR8 pathway activation, and caspase activation as compared to controls ASO-1 and ASO-139 (see FIGS. 68 and 69).

[0393] The effect of ASO-1196 and ASO-1197 on HBsAg and Terminal Human ALT1 was also evaluated in HBV infected PXB mice. Mice were injected with two doses of PBS or two doses of 25 mg/kg per dose of ASO over a time course of 28. While ASO-1196 showed a better overall in vitro profile, ASO-1197 performed better in vivo. Both ASO-1196 and ASO-1197 outperformed ASO-139.

### Example 64: RNase H Activity Assay

[0394] ASOs incorporating abasic monomers in the gap region (including ASO-676, ASO-677, ASO-707, ASO-1037, and ASO-1192) were compared against reference ASOs, ASO-1 and ASO-139, to assess RNase H activity. Human RNase H A1 was expressed in E. coli and purified. The target molecule AS836T, which includes a central RNA sequence flanked by deoxyribonucleotides and a 3′ Cy5, was synthesized by IDT. For the RNase H cleavage reaction, equal molar concentrations of ASO and the target were mixed at 60 nM for annealing, heated to 95° C. for 5 minutes, then cooled to 22° C. over 1 hour, followed by a 7-minute incubation at 22° C. The annealed oligos (2.5 μl) were incubated with RNase H (final concentration 0.06 mg/ml) and RNase inhibitor at 37° C. for 40 minutes in an 8 μl final volume. Reactions were stopped with Formamide sample buffer containing bromophenol blue, heated at 95° C. for 5 minutes,loaded onto a 15% PAGE-Urea gel, and separated at 250 volts for 2.5 hours. Signals from target and cleaved molecules were detected using the Typhoon 8600 Variable Mode Imager and processed with ImageQuant 5.2 software. As shown in FIG. 67, the ASOs incorporating at least one abasic monomer in the gap region showed altered RNase H cleavage.

### Example 65: ASOs 2′-Ome Abasic Monomer in the Gap and LNA Modifications in Wings

[0395] Further LNA walks were performed to assess the effect of LNA modifications in the wings of ASOs containing a 2′-OMe abasic monomer in the gap region. Using ASO-676, new ASOs (ASO-1269, -1270, -1271, -1272, -1297, -1298, -1299, -1300, -1301, and -1302) were prepared with an LNA at each different position within the wings. These ASOs were prepared and subjected to the assays described in Example 2 to determine RNAse H-mediated degradation, cytotoxicity, TLR8 pathway activation, and caspase activation as compared to controls ASO-1 and ASO-139 (see Table 70). The results showed that adding one LNA can improve in vitro RNase H activity and maintain a low caspase profile.

TABLE 70
Assay Results for ASOs based on ASO-676 with a 1x LNA walk

| | | | | | Caspase 3/7 | Caspase 3/7 |
|---|---|---|---|---|---|---|
| | | HepG2.2.15 | HepG2.2.15 | hTLR8 | Activity | Activity |
| | | HBsAg | HBsAg | Emax | Over | Over |
| Compound | | EC50 | CC50 | Fold over | ASO-1 | ASO-1 |
| ID | Design | (nM) | (nM) | ASO-1 | @167 nM | @ 56 nM |
| ASO-1 | | 5.81 | >167 | 1.00 | 1 | 1 |
| ASO-132 | | 0.97 | >167 | 0.77 | 0.99 | 1.68 |
| ASO-676 | mX 10 | 9.46 | >167 | 0.91 | 0.18 | 0.005 |
| ASO-1272 | LNA-Pos1 | 7.02 | >167 | 0.71 | 0.49 | 0.31 |
| ASO-1271 | LNA-Pos2 | 6.03 | >167 | 0.81 | 0.60 | 0.05 |
| ASO-1270 | LNA-Pos3 | 7.52 | >167 | 0.82 | 0.62 | 0.25 |
| ASO-1269 | LNA-Pos4 | 8.51 | >167 | 0.82 | 0.41 | 0.12 |
| ASO-1302 | LNA-Pos5 | 8.39 | >167 | 0.99 | 0.42 | 0.10 |
| ASO-1301 | LNA-Pos16 | 13.96 | >167 | 1.08 | 0.28 | 0.07 |
| ASO-1300 | LNA-Pos17 | 7.67 | >167 | 0.96 | −0.08 | −0.35 |
| ASO-1299 | LNA-Pos18 | 5.60 | >167 | 0.96 | 0.79 | 0.50 |
| ASO-1298 | LNA-Pos19 | 6.96 | >167 | 0.95 | 0.82 | 0.53 |
| ASO-1297 | LNA-Pos20 | 5.66 | >167 | 0.95 | 0.60 | 0.31 |

[0396] The same experiments were performed using ASO-676 as a parental ASO, but performing a 2×LNA walk in the wings to assess impacts on activity. These ASOs were prepared and subjected to the assays described in Example 2 to determine RNAse H-mediated degradation, cytotoxicity, TLR8 pathway activation, and caspase activation as compared to controls ASO-1 and ASO-139 (see Table 71). The results showed that adding two LNA can improve in vitro RNase H activity and maintain a low caspase profile.

TABLE 71
Assay Results for ASOs based on ASO-676 with a 2x LNA walk

| | | | | | Caspase 3/7 | Caspase 3/7 |
|---|---|---|---|---|---|---|
| | | HepG2.2.15 | HepG2.2.15 | hTLR8 | Activity | Activity |
| | | HBsAg | HBsAg | Emax | Over | Over |
| Compound | | EC50 | CC50 | Fold over | ASO-1 | ASO-1 |
| ID | Design | (nM) | (nM) | ASO-1 | @167 nM | @ 56 nM |
| ASO-1 | | 5.81 | >167 | 1.00 | 1 | 1 |
| ASO-139 | | 0.97 | >167 | 0.77 | 0.99 | 1.68 |
| ASO-676 | mX 10 | 9.46 | >167 | 0.91 | 0.18 | 0.005 |
| ASO-1284 | LNA_Pos2-16 | 9.21 | >167 | 1.10 | 0.56 | 0.17 |
| ASO-1283 | LNA_Pos2-17 | 5.49 | >167 | 0.96 | 0.90 | 0.32 |
| ASO-1282 | LNA_Pos2-18 | 4.53 | >167 | 0.79 | 1.16 | 0.55 |
| ASO-1281 | LNA_Pos2-19 | 4.95 | >167 | 0.82 | 0.85 | 0.29 |
| ASO-1280 | LNA_Pos2-20 | 4.28 | >167 | 0.85 | 0.88 | 0.10 |
| ASO-1279 | LNA-Pos3-4 | 6.93 | >167 | 1.11 | 0.72 | 0.18 |
| ASO-1278 | LNA-Pos3-5 | 6.69 | >167 | 1.02 | 0.84 | 0.25 |
| ASO-1277 | LNA-Pos3-16 | 10.58 | >167 | 1.13 | 0.75 | 0.25 |
| ASO-1276 | LNA-Pos3-17 | 6.32 | >167 | 1.01 | 0.49 | 0.021 |
| ASO-1275 | LNA-Pos3-18 | 5.44 | >167 | 0.92 | 0.63 | 0.024 |
| ASO-1274 | LNA-Pos3-19 | 5.84 | >167 | 0.83 | 0.79 | 0.016 |
| ASO-1273 | LNA-Pos3-20 | 3.50 | >167 | 0.83 | 0.83 | 0.011 |
| ASO-1303 | mX 10 LNA 4 5 | 5.40 | >167 | 0.81 | 0.73 | 0.36 |
| ASO-1304 | mX 10 LNA 4 16 | 10.50 | >167 | 0.86 | 0.35 | 0.04 |
| ASO-1305 | mX 10 LNA 4 17 | 6.93 | >167 | 0.78 | 0.11 | 0.010 |
| ASO-1306 | mX 10 LNA 4 18 | 5.41 | >167 | 0.81 | 0.52 | 0.16 |
| ASO-1307 | mX 10 LNA 4 19 | 4.63 | >167 | 0.78 | 0.57 | 0.00 |
| ASO-1308 | mX 10 LNA 4 20 | 3.50 | >167 | 0.74 | 0.79 | 0.15 |
| ASO-1309 | mX 10 LNA 5 16 | 8.79 | >167 | 0.93 | 0.71 | 0.46 |
| ASO-1310 | mX 10 LNA 5 17 | 7.33 | >167 | 0.81 | 0.76 | 0.61 |
| ASO-1311 | mX 10 LNA 5 18 | 4.37 | >167 | 0.82 | 0.93 | 0.55 |
| ASO-1312 | mX 10 LNA 5 19 | 4.92 | >167 | 0.75 | 0.87 | 0.38 |
| ASO-1313 | mX 10 LNA 5 20 | 3.95 | >167 | 0.72 | 1.00 | 0.79 |
| ASO-1314 | mX 10 LNA 16 17 | 10.70 | >167 | 0.72 | 0.54 | 0.21 |
| ASO-1315 | mX 10 LNA 16 18 | 8.97 | >167 | 1.05 | ND | ND |
| ASO-1316 | mX 10 LNA 16 19 | 9.54 | >167 | 1.00 | ND | ND |
| ASO-1317 | mX 10 LNA 16 20 | 7.62 | >167 | 1.06 | ND | ND |
| ASO-1318 | mX 10 LNA 17 18 | 4.82 | >167 | 0.69 | ND | ND |
| ASO-1319 | mX 10 LNA 17 19 | 5.14 | >167 | 0.75 | ND | ND |
| ASO-1320 | mX 10 LNA 17 20 | 3.46 | >167 | 0.74 | ND | IND |
| ASO-1321 | mX 10 LNA 18 19 | 3.16 | >167 | 0.81 | ND | ND |
| ASO-1322 | mX 10 LNA 18 20 | 2.37 | >167 | 0.68 | ND | ND |
| ASO-1323 | mX 10 LNA 19 20 | 3.84 | >167 | 0.73 | ND | ND |

### Example 66: ASOs 2′-Locked Abasic Monomer (InX) in the Gap

[0397] An exploratory walk was performed to assess the effect of incorporating a 2′-locked abasic monomer (InX) in the gap region. New ASOs were prepared with an InX at each different position within the gap. These ASOs were prepared and subjected to the assays described in Example 2 to determine RNAse H-mediated degradation, cytotoxicity, TLR8 pathway activation, and caspase activation as compared to controls ASO-1 and ASO-139 (see Table 72). Interestingly h TLR8 activity was maintained by many ASOs.

TABLE 72
Assay Results for ASOs with lnX in the Gap

| | | | | hTLR8 | Caspase | Caspase |
|---|---|---|---|---|---|---|
| | | | | Activity | Fold Over | Fold Over |
| Compound | | HepG2.2.15 | HepG2.2.15 | Fold over | ASO-1 | ASO-1 |
| ID | Design | EC50 nM | CC50 nM | ASO-1 | @ 167 nM | @ 56 nM |
| ASO-1 | | 5.70 | >167 | 1.00 | 1 | 1 |
| ASO-139 | | 0.98 | >167 | 0.85 | | |
| ASO-1266 | XLNA 6 | 14.11 | >167 | 0.93 | 0.61 | 0.21 |
| ASO-1265 | XLNA 7 | 17.33 | >167 | 0.92 | 0.71 | 0.58 |
| ASO-1264 | XLNA 8 | 16.44 | >167 | 1.08 | 0.70 | 0.33 |
| ASO-1263 | XLNA 9 | 20.1 | >167 | 0.98 | 0.73 | 0.77 |
| ASO-1262 | XLNA 10 | 17.35 | >167 | 1.02 | 0.63 | 0.08 |
| ASO-1261 | XLNA 11 | 13.56 | >167 | 1.07 | 0.95 | 0.29 |
| ASO-1260 | XLNA 12 | 35.01 | >167 | 0.89 | 0.76 | 0.38 |
| ASO-1259 | XLNA 13 | 28.4 | >167 | 1.08 | 0.79 | 0.29 |
| ASO-1268 | XLNA 14 | 28.3 | >167 | 0.95 | 0.70 | 0.21 |
| ASO-1267 | XLNA 15 | 25.35 | >167 | 0.84 | 0.96 | 0.53 |

### Example 67: ASOs 2′-MOE Abasic Monomer (moeX) in the Gap

[0398] An exploratory walk was performed to assess the effect of incorporating a 2′-MOE abasic monomer (moeX) in the gap region. New ASOs were prepared with a moeX at each different position within the gap. These ASOs were prepared and subjected to the assays described in Example 2 to determine RNAse H-mediated degradation, cytotoxicity, TLR8 pathway activation, and caspase activation as compared to controls ASO-1 and ASO-139 (see Table 73).

TABLE 73
Assay Results for ASOs with moeX in the Gap

| | | | | hTLR8 | Caspase | Caspase |
|---|---|---|---|---|---|---|
| | | | | Activity | Fold Over | Fold Over |
| Compound | | HepG2.2.15 | HepG2.2.15 | Fold over | ASO-1 | ASO-1 |
| ID | Design | EC50 nM | CC50 nM | ASO-1 | @ 167 nM | @ 56 nM |
| ASO-1 | | 5.70 | >167 | 1.00 | 1 | 1 |
| ASO-139 | | 0.98 | >167 | 0.85 | | |
| ASO-677 | mX 11 | 6.48 | >167 | 0.94 | 0.40 | 0.27 |
| ASO-1249 | moeX-Pos6 | 12.76 | >167 | 0.96 | 0.97 | 0.28 |
| ASO-1250 | moeX-Pos7 | 15.30 | >167 | 1.01 | 0.63 | 0.31 |
| ASO-1251 | moeX-Pos8 | 13.20 | >167 | 0.99 | 0.14 | 0.44 |
| ASO-1252 | moeX-Pos9 | 15.67 | >167 | 0.70 | 0.43 | 0.23 |
| ASO-1253 | moeX-Pos10 | 13.46 | >167 | 0.71 | 0.29 | 0.41 |
| ASO-1254 | moeX-Pos11 | 11.40 | >167 | 0.76 | 0.41 | 0.36 |
| ASO-1255 | moeX-Pos12 | 27.17 | >167 | 0.62 | 0.28 | 0.34 |
| ASO-1256 | moeX-Pos13 | 18.10 | >167 | 0.72 | 0.29 | 0.44 |
| ASO-1257 | moeX-Pos14 | 20.07 | >167 | 0.67 | 0.17 | 0.82 |
| ASO-1258 | moeX-Pos15 | 22.86 | >167 | 0.69 | 0.57 | 0.27 |

### Example 68: Preparation of Abasic Monomer 1

[chemical structure]

[0399] Preparation of (2): To a solution of 1 (360.0 g, 713.6 mmol), Et₃SiH (248.9 g, 2140.8 mmol) in ACN (1080 mL), TMSOTf (317.2 g, 1427.2 mmol) was added at r.t. The mixture was refluxed at 70° C. for 16 h. LC-MS showed 1 was consumed completely. The reaction solution was concentrated under reduced pressure, and then the reaction mixture was added into a solution of NaHCO₃. The mixture was extracted with EA (1.5 L*3). The combined organic layer was washed with brine, dried over Na₂SO₄, filtered and concentrated under reduced pressure. This resulted in crude 2 (343.0 g,) as a brown solid which was used directly for the next step; ESI-LCMS: m/z 446.9 [M+H]⁺.

[0400] Preparation of (3): [Journal of the Chemical Society, Perkin transactions 1, 1983, #11, p. 2675-2679]. To a solution of crude 2 (343.0 g, 768.3 mmol) in MeOH (500 mL) was added to a solution of 33% NH₂CH₃ in MeOH (3430 mL). The reaction mixture was stirred at r.t. for 14 h. LC-MS showed 2 was consumed completely. Solvent was removed under reduced pressure, The residue was purified by slurry with a mixture solvent of PE and EA (1:1, 2000 mL) to give 3 (86.0 g, 90.0% yield over two steps from 1 to intermediate 3) as a white solid; ¹H NMR (400 MHZ, Methanol-d₄) δ=4.17-4.11 (m, 1H), 4.05-3.93 (m, 2H), 3.79-3.68 (m, 3H), 3.59-3.54 (m, 1H).

[0401] Preparation of (4): To a solution of 3 (86.0 g, 641.2 mmol) in pyridine (860 mL) was added TIPSCI (222.5 g, 705.3 mmol). The reaction mixture was stirred at r.t. for 16 h. TLC showed 3 was consumed completely. The reaction solution was quenched with water (1.0 L), and the product was extracted with EA (1.0 L*3). The combined organic layer was washed with brine, dried over Na₂SO₄, filtered and concentrated under reduced pressure. The residue was purified by silica gel column chromatograph (eluent, PE:EA=50:1˜10:1) to give 4 (204.0 g, 84.5% yield) as a colorless oil; ¹H NMR (400 MHZ, DMSO-d₆) δ=4.70 (d, J=3.7 Hz, 1H, exchanged with D₂O), 4.11-4.00 (m, 2H), 3.96-3.92 (m, 1H), 3.91-3.79 (m, 2H), 3.66-3.62 (m, 1H), 3.56-3.52 (m, 1H), 1.03 (m, 28H).

[0402] Preparation of (5): To a solution of 4 (16.0 g, 42.5 mmol) in Mel (80 mL) was added Ag₂O (39.4 g, 169.9 mmol). The reaction mixture was refluxed at 40° C. for 16 h. TLC showed about 60% of 4 was consumed. Then mixture was filtered, the filtrates were concentrated under reduced pressure and purified by silica gel column chromatography (eluent, PE:EA=60:1˜50:1) to give 5 (7.0 g, 42.0% yield) as a colorless oil; ¹H NMR (400 MHZ, DMSO-d₆) δ=3.99-3.97 (m, 1H), 3.91-3.87 (m, 1H), 3.85-3.80 (m, 2H), 3.65-3.59 (m, 2H), 3.43 (s, 3H), 1.08-0.99 (m, 28H).

[0403] Preparation of (6): [Carbohydrate Research, 1995, vol. 274, #1, p. 99-110]. To a solution of 5 (7.0 g, 17.9 mmol) in THF (140 mL) was added TBAF (21.5 mL, 21.5 mmol). The reaction mixture was stirred at r.t for 8 h. TLC showed 5 was consumed completely. Solvent was removed under reduced pressure. This resulted in to give crude 6 (11.5 g, 77.6 mmol) as a yellow oil which was used directly for the next step.

[0404] Preparation of (7): To a solution of crude 6 (11.5 g, 77.6 mmol) in pyridine (115 mL) was added DMTrCl (78.9 g, 232.9 mmol). The reaction mixture was stirred at r.t. for 14 h. TLC showed 6 was consumed completely. The reaction solution was quenched with water (200 mL), and the product was extracted with EA (200.0 mL*3). The combined organic layer was washed with brine, dried over Na₂SO₄, filtered and concentrated under reduced pressure. The residue was purified by silica gel column chromatograph (eluent, PE:EA=10:1˜3:1) to give 7 (4.8 g, 59.8% yield over two steps from intermediate 5 to intermediate 7) as a yellow oil; ESI-LCMS: m/z 449.2 [M−H]⁺; ¹H NMR (400 MHZ, DMSO-d₆) δ=7.42-7.37 (m, 2H), 7.32-7.28 (m, 2H), 7.27-7.22 (m, 4H), 7.22-7.17 (m, 1H), 6.90-6.87 (m, 4H), 4.79 (d, J=7.0 Hz, 1H, exchanged with D₂O), 3.95-3.85 (m, 2H), 3.74 (s, 6H), 3.73-3.69 (m, 2H), 3.70-3.68 (m, 1H), 3.33 (s, 3H), 3.10-3.07 (m, 1H), 2.95-3.91 (m, 1H).

[0405] Preparation of (a protected version of Abasic Monomer 1): To a solution of 5 (2.3 g, 5.1 mmol) in DCM (23 mL) with an inert atmosphere of nitrogen was added CEOP[N(iPr)₂]₂ (1.7 g, 5.6 mmol) and DCI (0.4 g, 3.6 mmol). The resulting solution was concentrated under reduced pressure. The residue was purified by Flash-Prep-HPLC with the following conditions (IntelFlash-1): Column, C18 silica gel; mobile phase, CH: CN/H₂O (0.5% NH₄HCO₃)=1/1 increasing to CH₃CN/H₂O (0.5% NH₄HCO₃)=1/0 within 20 min, the eluted product was collected at CH₃CN/H₂O (0.5% NH₄HCO₃)=1/0; Detector, UV 254 nm. This resulted in to give Abasic Monomer 1 (2.6 g, 78.2% yield) as a colorless oil; ESI-LCMS: m/z 651.2 [M+H]⁺; ¹H NMR (400 MHZ, DMSO-d6) δ=7.43-7.38 (m, 2H), 7.34-7.16 (m, 7H), 6.93-6.84 (m, 4H), 4.27-4.08 (m, 1H), 4.03-3.82 (m, 3H), 3.82-3.67 (m, 8H), 3.60-3.40 (m, 3H), 3.38-3.31 (m, 3H), 3.27-3.10 (m, 1H), 3.00-2.90 (m, 1H), 2.80-2.70 (m, 1H), 2.60-2.52 (m, 1H), 1.15-1.02 (m, 9H), 0.97-0.87 (m, 3H). ³¹P NMR (162 MHz, DMSO-d6) δ=148.603, 148.464.

### Example 69: Preparation of Abasic Monomer 3

[chemical structure]

[chemical structure]

[0406] Preparation of (2): To a solution of 1 (30.0 g, 87.9 mmol) in pyridine (300 mL) was added BzCl (49.4 g, 351.6 mmol). The mixture was stirred at r.t. for 8 hours. LC-MS showed 1 was consumed completely. Then diluted in EA and washed with saturated aqueous sodium bicarbonate twice followed by brine, then dried over Na₂SO₄, filtered and concentrated under reduced pressure. This resulted in crude 2 and 2b (65.0 g, the ratio of 2 and 2b=1:1), which was used directly for the next step.

[0407] Preparation of (3): To a solution of crude 2 and 2b (65.0 g) in ACN (280 mL) was added Et₃SiH (33.8 g, 290.7 mmol) and dropped TMSOTf (64.6 g, 290.1 mmol) into the reaction. The reaction mixture was stirred at 60° C. for 40 h. LC-MS showed 2 was consumed completely. The combined organic layer was washed with water and brine, dried over Na₂SO₄, and concentrated under reduced pressure. The residue was purified by silica gel column chromatograph (eluent, PE:EA=20:1˜5:1). This resulted in 3 (11.0 g, 31.2% yield over two steps from 1 to intermediate 3) as a colorless oil; ESI-LCMS: m/z 401.1 [M+H]⁺; ¹H NMR (400 MHZ, CDCl₃-d) δ=8.10-8.02 (m, 4H), 7.58-7.55 (m, 2H), 7.53-7.39 (m, 4H), 5.39-5.36 (m, 1H), 4.59-4.54 (m, 1H), 4.50-4.46 (m, 2H), 4.36-4.32 (m, 1H), 4.26-4.23 (m, 1H), 3.98-3.94 (m, 1H), 3.70-3.64 (m, 2H), 3.45-3.42 (m, 2H), 3.24 (s, 3H).

[0408] Preparation of (4): A solution of 3 (11.0 g, 27.4 mmol) in 33% of CH₃NH₂ methanol (110 mL) was stirred at r.t for 4 hours. TLC (DCM:MeOH=10:1) showed 3 was consumed completely. The solution was concentrated under reduced pressure to get crude 4 (3.0 g), which was used directly for the next step.

[0409] Preparation of (5): To a solution of crude 4 (3.0 g) in pyridine (30 mL) was added DMTrCl (5.8 g, 17.2 mmol). The mixture was stirred at r.t. for 4 hours. TLC (DCM:MeOH=10:1) showed 3 was consumed completely. Then dissolved in EA and washed with saturated aqueous sodium bicarbonate twice followed by brine, then dried over Na₂SO₄, filtered and concentrated under reduced pressure. The residue was purified by silica gel column chromatograph (eluent, PE:EA=100:1˜40:1) to get product 5 (3.5 g, 25.9% yield over two steps from intermediate 3 to intermediate 5). ESI-LCMS: m/z 493.2 [M−H]⁻; ¹H NMR (400 MHZ, CDCl₃-d) δ=7.47-7.41 (m, 1H), 7.37-7.23 (m, 6H), 7.21-7.13 (m, 2H), 6.89-6.76 (m, 4H), 4.19-4.12 (m, 1H), 4.12-4.04 (m, 2H), 4.01-3.93 (m, 1H), 3.85-3.81 (m, 3H), 3.79 (s, 6H), 3.70-3.64 (m, 1H), 3.62-3.48 (m, 2H), 3.40 (d, J=3.2 Hz, 3H), 3.31-3.25 (m, 1H), 3.11 (m, 1H).

[0410] Preparation of (a protected version of Abasic monomer 3): To a solution of 5 (3.5 g, 7.1 mmol) in DCM (35 mL) was added DCI (0.5 g, 5.7 mmol) and CEP[N(iPr)₂]₂ (2.75 g, 10.1 mmol) at r.t at N₂. The mixture was stirred at r.t. for 2 h. LC-MS showed 5 was consumed completely. The solution was washed with water twice and washed with brine and dried over Na₂SO₄, filtered. Then the solution was concentrated under reduced pressure and the residue was purified by Flash-Prep-HPLC with the following conditions (IntelFlash-1): Column, C18 silica gel; mobile phase, CH₃CN/H₂O (0.5% NH₄HCO₃)=1/1 increasing to CH₃CN/H₂O (0.5% NH₄HCO₃)=1/0 within 20 min, the eluted product was collected at CH₃CN/H₂O (0.5% NH₄HCO₃)=1/0; Detector, UV 254 nm. This resulted in to give Abasic monomer 3 (3.6 g, 73.2% yield) as a white solid; ESI-LCMS: m/z 617.2 [M+H]⁺; ¹H NMR (400 MHZ, DMSO-d₆) δ=7.43-7.12 (m, 9H), 6.94-6.80 (m, 4H), 4.15-4.12 (m, 1H), 4.04-3.87 (m, 3H), 3.79-3.41 (m, 15H), 3.25 (d, J=4.7 Hz, 3H), 3.22-3.13 (m, 1H), 2.96-2.93 (m, 1H), 2.78-2.71 (m, 1H), 2.54 (d, J=6.5 Hz, 1H), 1.14-1.04 (m, 8H), 0.91 (d, J=6.8 Hz, 4H); ³¹P NMR (162 MHz, DMSO-d₆) δ=148.40, 148.12.

### Example 70: Preparation of Abasic Monomer 2

[chemical structure]

[0411] Preparation of (2): To a solution of 1 (200.0 g, 825.7 mmol) in pyridine (2.0 L) was added DMTrCl (307.3 g, 909.1 mmol) at r.t at N₂. The solution was stirred at r.t for 1 hours. The solution was diluted with EA (10.0 L), washed with water (2×15.0 L) and brine (5.0 L). The organic phase was dried over anhydrous Na₂SO₄, concentrated by rotary evaporator to give crude 2 (460.0 g) as a yellow oil which was used directly for the next step. ESI-LCMS m/z 543.2 [M−H].⁻

[0412] Preparation of (3): To a solution of crude 2 (460.0 g) in DMF (4.0 L) was added imidazole (281.0 g, 4.1 mol) and TBSCI (250.0 g, 1.6 mol) at r.t at N₂. The solution was stirred at r.t for 16 hours. The solution was diluted with EA (10.0 L), washed with water (2×15.0 L) and brine (4.0 L). The organic phase was dried over anhydrous Na₂SO₄, then the solution was concentrated under reduced pressure. The residue was isolated by silica gel column chromatography (eluent, PE/EA=20:1). This resulted in to give 3 (440.0 g, 80.9% yield over two steps from 1 to intermediate 3) as a white solid. ESI-LCMS m/z 657.2 [M−H].⁻

[0413] Preparation of (4): To a solution of 3 (440.0 g, 667.8 mmol) in HMDS (4.0 L) was added (NH₄)₂SO₄ (313.1 g, 2.3 mol) at 135° C. at N₂. The solution was stirred at 135° C. for 16 hours. TLC show SM was completely consumed. The solution was diluted with EA (10.0 L), washed with water (2×10.0 L) and brine (5.0 L). The organic phase was dried over anhydrous Na₂SO₄, then the solution was concentrated under reduced pressure. The residue was isolated by silica gel column chromatography (eluent, PE/EA=5:1) to give 4 (120.0 g, 225.2 mmol, 33.7% yield) as a yellow oil. ¹H NMR (400 MHZ, DMSO-d₆) δ:7.47-7.20 (m, 9H), 7.00-6.83 (m, 4H), 6.75-6.67 (m, 1H), 5.14-5.04 (m, 1H), 4.88-4.77 (m, 1H), 4.29-4.18 (m, 1H), 3.75 (s, 6H), 3.14-2.99 (m, 2H), 0.829 (s, 9H), 0.00 (s, 6H).

[0414] Preparation of (5): To a solution of 4 (100.0 g, 187.7 mmol) in THF (2000 mL) was added 10% of Pd/C (20 g) at r.t under H₂ balloon. The solution was stirred at r.t for 16 hours. TLC show SM was completely consumed. The solution was filtered and the filter was concentrated to give the crude 5 (90.0 g) as a clear oil without further purified and used directly for the next step.

[0415] Preparation of (6): [Nucleosides, nucleotides and nucleic acids, 2016, vol. 35, #2, p. 64 75]. To a solution of 5 (90.0 g) in THF (900 mL) was added 1M TBAF in THF (219 mL, 219.1 mmol) at r.t. The solution was stirred at r.t for 15 hours. LCMS and TLC show SM was completely consumed. The solution was deal with EA (1.0 L), washed with water (2×2.0 L) and brine (1.0 L). The organic phase was dried over anhydrous Na₂SO₄, then the solution was concentrated under reduced pressure. The residue was purified by silica gel column chromatograph (eluent, PE/EA=2:1). This resulted in to give 6 (50.5 g, 64.2% yield over two steps from intermediate 4 to intermediate 6) as a yellow oil. ¹H NMR (400 MHz, DMSO-d₆) δ:7.47-7.12 (m, 9H), 6.97-6.81 (m, 4H), 4.94 (d, J=4.4 Hz, 1H), 4.10-3.77 (m, 4H), 3.73 (s, 6H), 3.01-2.85 (m, 2H), 1.98-1.87 (m, 1H), 1.77-1.65 (m, 1H).

[0416] Preparation of (a protected version of Abasic monomer 2): To a solution of 6 (50.0 g, 118.9 mmol) in DCM (500 mL) was added DCI (11.9 g, 101.1 mmol) and CEP[N(iPr)₂]₂ (43.0 g, 142.8 mmol) at r.t at N₂. The mixture was stirred at r.t 2 for 2 h. The mixture was added NaHCO₃ aqueous (500 mL) and extracted with DCM (200 mL). Then the organic layer was washed with water (300 mL) and brine (300 mL) and dried over Na₂SO₄. The solution was filtered and the filter was concentrated to give the crude. The crude was purified by Flash-Prep-HPLC with the following conditions (IntelFlash-1): Column, C18 silica gel; mobile phase, CH₃CN/H₂O (0.05% NH₄HCO₃)=3/2 increasing to CH₃CN/H₂O (0.05% NH₄HCO₃)=1/0 within 20 min, the eluted product was collected at CH₃CN/H₂O (0.05% NH₄HCO₃)=9/1; Detector, UV 254 nm. This resulted in to give Abasic monomer 2 (51.0 g, 69.1% yield) as a yellow oil. ESI-LCMS 621.2 m/z [M+H]⁺. ¹H NMR (400 MHZ, DMSO-d₆) δ:7.44-7.16 (m, 9H), 6.97-6.82 (m, 4H), 4.38-4.24 (m, 1H), 3.97-3.76 (m, 3H), 3.76-3.44 (m, 10H), 3.08-2.92 (m, 2H), 2.76-2.70 (m, 1H), 2.67-2.60 (m, 1H), 2.11-1.81 (m, 2H), 1.18-0.93 (m, 12H). ³¹P NMR (162 MHZ, DMSO-d₆) δ 146.81, 146.61.

### Example 71: Preparation of Abasic Monomer 4

[chemical structure]

[chemical structure]

[0417] Preparation of (2): To a solution of 1 (50.0 g, 161.1 mmol) in DMF (500 mL) was added NaH (7.1 g, 177.2 mmol, 60% purity) at an ice salt batch to control the internal reaction to 0° C. The mixture was stirred at 0° C. for 1 h, then BnBr (30.3 g, 177.2 mmol) was added drop wise, the mixture was stirred at r.t. for 8 h, TLC showed 1 was consumed completely. The solution was poured into water (2.0 L) and the product was extracted with EA (200 mL*3). The combined organic layer was washed with water and brine, dried over Na₂SO₄, filtered and concentrated under reduced pressure. This resulted in to give crude 2 (57.5 g) as a colorless oil, which was used directly for the next step.

[0418] Preparation of (3): To a solution of 2 (57.5 g) in pyridine (600 mL) was added drop wise MsCl (20.3 g, 177.2 mmol) at an ice salt batch to control the internal reaction to 0° C. The reaction mixture was stirred at r.t. for 2 h. TLC showed 2 was consumed completely. The solution was poured into water (2.0 L) and the product was extracted with EA (200 mL*3). The combined organic layer was washed with water and brine, dried over Na₂SO₄, filtered and concentrated under reduced pressure. The residue was purified by silica gel column chromatograph (eluent, PE:EA=10:1˜5:1). This resulted in to give 3 (36.8 g, 47.7% yield over two step from 1 to intermediate 3) as a colorless oil; ¹H NMR (400 MHZ, CDCl₃-d): δ=7.35-7.24 (m, 10H), 5.77 (d, J=3.6 Hz, 1H), 4.85 (d, J=11.4 Hz, 1H), 4.72 (d, J=12.0 Hz, 1H), 4.64-4.62 (m, 1H), 4.54-4.42 (m, 4H), 4.29-4.27 (m, 1H), 3.60-3.58 (m, 1H), 3.52-3.47 (m, 1H), 3.06 (s, 3H,), 1.68 (s, 3H), 1.34 (s, 3H).

[0419] Preparation of (4): To a solution of 3 (36.8 g, 76.9 mmol) in MeOH (1500 mL) was added con.aq.HCl (225 mL). The mixture was stirred at r.t. for 16 h. TLC showed 3 was consumed completely. The reaction solution was quenched with water (4.0 L), and the product was extracted with EA (500 mL*3). The combined organic layer was washed with water and brine, dried over Na₂SO₄, filtered and concentrated under reduced pressure give crude 4 (33.8 g) as a colorless oil, which was used directly for the next step.

[0420] Preparation of (5): To a solution of 4 (33.8 g,) in DMF (350 mL) was added NaH (3.0 g, 74.6 mmol, 60%) at an ice salt batch to control the internal reaction to 0° C. The mixture was stirred at r.t. for 2 h, TLC showed 4 was consumed completely. The solution was poured into water (2.0 L) and the product was extracted with EA (200 mL*3). The combined organic layer was washed with water and brine, dried over Na₂SO₄, filtered and concentrated under reduced pressure. The residue was purified by silica gel column chromatograph (eluent, PE:EA=1:0˜10:1). This resulted in 5 (17.2 g, 62.8% yield over two steps from intermediate 3 to intermediate 5) as a colorless oil; 1H NMR (600 MHZ, CDCl₃-d): δ=7.31-7.23 (m, 10H), 4.80 (s, 1H), 4.66-4.53 (m, 4H), 4.12-4.08 (m, 2H), 3.99 (d, J=7.2 Hz 1H), 3.8-4.75 (m, 3H), 3.38 (s, 3H).

[0421] Preparation of (6): A solution of 5 (17.0 g, 47.7 mmol) in AcOH (170 mL) was stirred at r.t. for 14 h. TLC showed 5 was consumed completely. The solution was poured into water (2.0 L), the product was extracted with EA (0.5 L*3), the combined organic layer washed with brine and dried over Na₂SO₄, filtered. Then the solution was filtered and concentrated under reduced pressure to give crude 4 (16.0 g) as a colorless oil, which was used in the next step directly.

[0422] Preparation of (7): To a solution of 6 (16.0 g) in MeOH (160 mL) was added NaBH4 (2.5 g, 91.1 mmol). The mixture was stirred at r.t. for 1 h. TLC showed 6 was consumed completely. The solution was poured into water (1.0 L) and the product was extracted with EA (200 mL*3), the combined organic layer was washed and washed with brine and dried over Na₂SO₄, filtered. Then the solution was concentrated under reduced pressure and the residue was purified by silica gel column chromatograph (eluent, PE:EA=1:0˜15:1). This resulted in 7 (12.8 g, 78.0% yield over two steps from intermediate 5 to intermediate 7) as a colorless oil; 1H NMR (400 MHZ, CDCl₃-d): δ=7.34-7.23 (m, 10H), 4.60-4.53 (m, 4H), 4.03-4.01 (m, 1H), 3.86-3.72 (m, 5H), 3.60-4.57 (m, 2H), 3.15 (s, 2H).

[0423] Preparation of (8): [Tetrahedron Letters, 2000, vol. 41, #46, p. 8923-8927]. To a solution of 6 (12.8 g, 37.2 mmol) in THF (130 mL) was added Bu₃P (11.3 g, 55.8 mmol), and DIAD (11.3 g, 55.8 mmol). The reaction mixture was stirred at r.t. for 8 h under N₂. TLC showed 7 was consumed completely. The solution was poured into water (500 mL) and the product was extracted with EA (100 mL*3), the combined organic layer was washed and washed with brine and dried over Na₂SO₄, filtered. Then the solution was concentrated under reduced pressure. The residue was purified by silica gel column chromatograph (eluent, PE:EA=20:1˜5:1). This resulted in 8 (7.5 g, 61.8% yield) as a colorless oil. ¹H NMR (600 MHZ, CDCl₃-d) δ=7.33-7.24 (m, 10H), 4.69-4.56 (m, 4H), 4.29 (s, 1H), 4.06-3.93 (m, 5H), 3.73-3.70 (m, 2H).

[0424] Preparation of (9): To a solution of 8 (7.5 g, 23.0 mmol) in MeOH (75 mL) was added Pd/(OH)₂ (1.5 g) under H₂ balloon at r.t for 18 hours. TLC showed 7 was consumed completely. The solids were filtered out and the solution was concentrated the solvent under reduced pressure. This resulted in crude 9 (1.5 g), which was used for the next step directly.

[0425] Preparation of (10): To a solution of crude 9 (1.5 g) in pyridine (15 mL) was added DMTrCl (4.2 g, 12.3 mmol). The reaction mixture was stirred at r.t. for 4 h. LC-MS showed 9 was consumed completely. Then the solution was concentrated under reduced pressure and the residue was purified by silica gel column chromatograph (eluent, PE:EA=50:1˜3:1). This resulted in 10 (3.0 g, 29.1% yield over two steps from intermediate 8 to intermediate 10) as a white solid. ¹H NMR (600 MHZ, DMSO-d6) δ=7.28-7.14 (m, 9H), 6.91-6.87 (m, 4H), 5.42 (d, J=4.8 Hz 1H, exchanged with D₂O), 4.07-3.85 (m, 5H), 3.76-3.73 (m, 7H), 3.26-3.14 (m, 2H).

[0426] Preparation of abasic monomer 4): [Journal of Organic Chemistry, 2000, vol. 65, #17, p. 5167-5176]. To a solution of 10 (2.5 g, 5.6 mmol) in DCM (25 mL) was added DCI (0.5 g, 4.1 mmol) and CEP[N(iPr)₂]₂ (2.4 g, 8.0 mmol) at r.t under N₂. The mixture was stirred at r.t. for 2 h. LC-MS showed 10 was consumed completely. The solution was washed with water twice and washed with brine and dried over Na₂SO₄, filtered. Then the solution was concentrated under reduced pressure and the residue was purified by Flash-Prep-HPLC with the following conditions (IntelFlash-1): Column, C18 silica gel; mobile phase, CH₃CN/H₂O (0.5% NH₄HCO₃)=1/1 increasing to CH₃CN/H₂O (0.5% NH₄HCO₃)=1/0 within 20 min, the eluted product was collected at CH₃CN/H₂O (0.5% NH₄HCO₃)=1/0; Detector, UV 254 nm. This resulted in to give abasic monomer 4 (2.3 g, 66.1% yield) as a white solid; ESI-LCMS: m/z 650.2 [M+H]⁺; ¹H NMR (400 MHZ, DMSO-d₆) δ=7.42-7.20 (m, 9H), 6.99-6.86 (m, 4H), 4.31 (s, 1H), 4.22-4.15 (m, 1H), 4.02-3.96 (m, 2H), 3.86-3.65 (m, 9H), 3.53-3.49 (m, 3H), 3.25-3.17 (m, 1H), 2.79-2.2.75 (m, 1H), 2.62-2.56 (m, 1H), 1.12-1.01 (m, 9H), 0.92-0.87 (m, 3H); ³¹P NMR (162 MHz, DMSO-d6) δ=147.56, 146.58.

### Example 72: Effect of GalNAc on Liver/Kidney Ratio and In Vivo Efficacy

[0427] Various GalNAc conjugates were prepared and tested to assess the impact of incorporating a monomeric or dimeric GalNAc (specifically GalNAc 4) onto the end(s) of the disclosed ASOs. Using ASO-6 as a parental ASO, various monomeric or dimeric GalNAcs were conjugates to the ends of the ASO (see FIG. 70) and administered to mice with a hTLRb knock-in. Interferon-α and Interferon-β levels were assessed. As shown in FIG. 70, monomeric GalNAc strikes a favorable balance between RNaseH (shown in other figures) and immune response, thus suggesting monomeric GalNAc may be useful for conjugation onto the disclosed ASOs to treat HBV.

### VI. HBV Nucleotide Sequence

[0428] Hepatitis B virus (Genbank Accession No. U95551.1; SEQ ID NO: 1)

(SEQ ID NO: 1)
AATTCCACAACCTTTCACCAAACTCTGCAAGATCCCAGAGTGAGAGGCCTGTATTTC
CCTGCTGGTGGCTCCAGTTCAGGAGCAGTAAACCCTGTTCCGACTACTGCCTCTCCC
TTATCGTCAATCTTCTCGAGGATTGGGGACCCTGCGCTGAACATGGAGAACATCACA
TCAGGATTCCTAGGACCCCTTCTCGTGTTACAGGCGGGGTTTTTCTTGTTGACAAGA
ATCCTCACAATACCGCAGAGTCTAGACTCGTGGTGGACTTCTCTCAATTTTCTAGGG
GGAACTACCGTGTGTCTTGGCCAAAATTCGCAGTCCCCAACCTCCAATCACTCACCA
ACCTCCTGTCCTCCAACTTGTCCTGGTTATCGCTGGATGTGTCTGCGGCGTTTTATCA
TCTTCCTCTTCATCCTGCTGCTATGCCTCATCTTCTTGTTGGTTCTTCTGGACTATCAA
GGTATGTTGCCCGTTTGTCCTCTAATTCCAGGATCCTCAACCACCAGCACGGGACCA
TGCCGAACCTGCATGACTACTGCTCAAGGAACCTCTATGTATCCCTCCTGTTGCTGTA
CCAAACCTTCGGACGGAAATTGCACCTGTATTCCCATCCCATCATCCTGGGCTTTCG
GAAAATTCCTATGGGAGTGGGCCTCAGCCCGTTTCTCCTGGCTCAGTTTACTAGTGC
CATTTGTTCAGTGGTTCGTAGGGCTTTCCCCCACTGTTTGGCTTTCAGTTATATGGAT
GATGTGGTATTGGGGGCCAAGTCTGTACAGCATCTTGAGTCCCTTTTTACCGCTGTTA
CCAATTTTCTTTTGTCTTTGGGTATACATTTAAACCCTAACAAAACAAAGAGATGGG
GTTACTCTCTGAATTTTATGGGTTATGTCATTGGAAGTTATGGGTCCTTGCCACAAGA
ACACATCATACAAAAAATCAAAGAATGTTTTAGAAAACTTCCTATTAACAGGCCTAT
TGATTGGAAAGTATGTCAACGAATTGTGGGTCTTTTGGGTTTTGCTGCCCCATTTACA
CAATGTGGTTATCCTGCGTTAATGCCCTTGTATGCATGTATTCAATCTAAGCAGGCTT
TCACTTTCTCGCCAACTTACAAGGCCTTTCTGTGTAAACAATACCTGAACCTTTACCC
CGTTGCCCGGCAACGGCCAGGTCTGTGCCAAGTGTTTGCTGACGCAACCCCCACTGG
CTGGGGCTTGGTCATGGGCCATCAGCGCGTGCGTGGAACCTTTTCGGCTCCTCTGCC
GATCCATACTGCGGAACTCCTAGCCGCTTGTTTTGCTCGCAGCAGGTCTGGAGCAAA
CATTATCGGGACTGATAACTCTGTTGTCCTCTCCCGCAAATATACATCGTATCCATGG
CTGCTAGGCTGTGCTGCCAACTGGATCCTGCGCGGGACGTCCTTTGTTTACGTCCCGT
CGGCGCTGAATCCTGCGGACGACCCTTCTCGGGGTCGCTTGGGACTCTCTCGTCCCC
TTCTCCGTCTGCCGTTCCGACCGACCACGGGGCGCACCTCTCTTTACGCGGACTCCC
CGTCTGTGCCTTCTCATCTGCCGGACCGTGTGCACTTCGCTTCACCTCTGCACGTCGC
ATGGAGACCACCGTGAACGCCCACCGAATGTTGCCCAAGGTCTTACATAAGAGGAC
TCTTGGACTCTCTGCAATGTCAACGACCGACCTTGAGGCATACTTCAAAGACTGTTT
GTTTAAAGACTGGGAGGAGTTGGGGGAGGAGATTAGATTAAAGGTCTTTGTACTAG
GAGGCTGTAGGCATAAATTGGTCTGCGCACCAGCACCATGCAACTTTTTCACCTCTG
CCTAATCATCTCTTGTTCATGTCCTACTGTTCAAGCCTCCAAGCTGTGCCTTGGGTGG
CTTTGGGGCATGGACATCGACCCTTATAAAGAATTTGGAGCTACTGTGGAGTTACTC
TCGTTTTTGCCTTCTGACTTCTTTCCTTCAGTACGAGATCTTCTAGATACCGCCTCAG
CTCTGTATCGGGAAGCCTTAGAGTCTCCTGAGCATTGTTCACCTCACCATACTGCACT
CAGGCAAGCAATTCTTTGCTGGGGGGAACTAATGACTCTAGCTACCTGGGTGGGTGT
TAATTTGGAAGATCCAGCATCTAGAGACCTAGTAGTCAGTTATGTCAACACTAATAT
GGGCCTAAAGTTCAGGCAACTCTTGTGGTTTCACATTTCTTGTCTCACTTTTGGAAGA
GAAACCGTTATAGAGTATTTGGTGTCTTTCGGAGTGTGGATTCGCACTCCTCCAGCTT
ATAGACCACCAAATGCCCCTATCCTATCAACACTTCCGGAAACTACTGTTGTTAGAC
GACGAGGCAGGTCCCCTAGAAGAAGAACTCCCTCGCCTCGCAGACGAAGGTCTCAA
TCGCCGCGTCGCAGAAGATCTCAATCTCGGGAACCTCAATGTTAGTATTCCTTGGAC
TCATAAGGTGGGGAACTTTACTGGTCTTTATTCTTCTACTGTACCTGTCTTTAATCCT
CATTGGAAAACACCATCTTTTCCTAATATACATTTACACCAAGACATTATCAAAAAA
TGTGAACAGTTTGTAGGCCCACTTACAGTTAATGAGAAAAGAAGATTGCAATTGATT
ATGCCTGCTAGGTTTTATCCAAAGGTTACCAAATATTTACCATTGGATAAGGGTATT
AAACCTTATTATCCAGAACATCTAGTTAATCATTACTTCCAAACTAGACACTATTTAC
ACACTCTATGGAAGGCGGGTATATTATATAAGAGAGAAACAACACATAGCGCCTCA
TTTTGTGGGTCACCATATTCTTGGGAACAAGATCTACAGCATGGGGCAGAATCTTTC
CACCAGCAATCCTCTGGGATTCTTTCCCGACCACCAGTTGGATCCAGCCTTCAGAGC
AAACACAGCAAATCCAGATTGGGACTTCAATCCCAACAAGGACACCTGGCCAGACG
CCAACAAGGTAGGAGCTGGAGCATTCGGGCTGGGTTTCACCCCACCGCACGGAGGC
CTTTTGGGGTGGAGCCCTCAGGCTCAGGGCATACTACAAACTTTGCCAGCAAATCCG
CCTCCTGCCTCCACCAATCGCCAGACAGGAAGGCAGCCTACCCCGCTGTCTCCACCT
TTGAGAAACACTCATCCTCAGGCCATGCAGTGG

### EQUIVALENTS

[0429] The present technology is not to be limited in terms of the particular embodiments described in this application, which are intended as single illustrations of individual aspects of the present technology. Many modifications and variations of this present technology can be made without departing from its spirit and scope, as will be apparent to those skilled in the art.

[0430] Functionally equivalent methods and apparatuses within the scope of the present technology, in addition to those enumerated herein, will be apparent to those skilled in the art from the foregoing descriptions. Such modifications and variations are intended to fall within the scope of the present technology. It is to be understood that this present technology is not limited to particular methods, reagents, compounds, compositions or biological systems, which can, of course, vary. It is also to be understood that the terminology used herein is for the purpose of describing particular embodiments only and is not intended to be limiting.

[0431] All patents, patent applications, provisional applications, and publications referred to or cited herein are incorporated by reference in their entirety, including all figures and tables, to the extent that are not inconsistent with the explicit teachings of this specification.

The application's sequence listing, which the Patent Office published only in electronic form, follows.

SEQUENCE LISTING (1344 sequences)

SEQ ID NO: 1 - DNA, 3182 bp, Hepatitis B virus
  source 1..3182: mol_type = genomic DNA
aattccacaacctttcaccaaactctgcaagatcccagagtgagaggcctgtatttccctgctggtggctccagttcaggagcagtaaaccctgttccgactactgcctctcccttatcgtcaatcttctcgaggattggggaccctgcgctgaacatggagaacatcacatcaggattcctaggaccccttctcgtgttacaggcggggtttttcttgttgacaagaatcctcacaataccgcagagtctagactcgtggtggacttctctcaattttctagggggaactaccgtgtgtcttggccaaaattcgcagtccccaacctccaatcactcaccaacctcctgtcctccaacttgtcctggttatcgctggatgtgtctgcggcgttttatcatcttcctcttcatcctgctgctatgcctcatcttcttgttggttcttctggactatcaaggtatgttgcccgtttgtcctctaattccaggatcctcaaccaccagcacgggaccatgccgaacctgcatgactactgctcaaggaacctctatgtatccctcctgttgctgtaccaaaccttcggacggaaattgcacctgtattcccatcccatcatcctgggctttcggaaaattcctatgggagtgggcctcagcccgtttctcctggctcagtttactagtgccatttgttcagtggttcgtagggctttcccccactgtttggctttcagttatatggatgatgtggtattgggggccaagtctgtacagcatcttgagtccctttttaccgctgttaccaattttcttttgtctttgggtatacatttaaaccctaacaaaacaaagagatggggttactctctgaattttatgggttatgtcattggaagttatgggtccttgccacaagaacacatcatacaaaaaatcaaagaatgttttagaaaacttcctattaacaggcctattgattggaaagtatgtcaacgaattgtgggtcttttgggttttgctgccccatttacacaatgtggttatcctgcgttaatgcccttgtatgcatgtattcaatctaagcaggctttcactttctcgccaacttacaaggcctttctgtgtaaacaatacctgaacctttaccccgttgcccggcaacggccaggtctgtgccaagtgtttgctgacgcaacccccactggctggggcttggtcatgggccatcagcgcgtgcgtggaaccttttcggctcctctgccgatccatactgcggaactcctagccgcttgttttgctcgcagcaggtctggagcaaacattatcgggactgataactctgttgtcctctcccgcaaatatacatcgtatccatggctgctaggctgtgctgccaactggatcctgcgcgggacgtcctttgtttacgtcccgtcggcgctgaatcctgcggacgacccttctcggggtcgcttgggactctctcgtccccttctccgtctgccgttccgaccgaccacggggcgcacctctctttacgcggactccccgtctgtgccttctcatctgccggaccgtgtgcacttcgcttcacctctgcacgtcgcatggagaccaccgtgaacgcccaccgaatgttgcccaaggtcttacataagaggactcttggactctctgcaatgtcaacgaccgaccttgaggcatacttcaaagactgtttgtttaaagactgggaggagttgggggaggagattagattaaaggtctttgtactaggaggctgtaggcataaattggtctgcgcaccagcaccatgcaactttttcacctctgcctaatcatctcttgttcatgtcctactgttcaagcctccaagctgtgccttgggtggctttggggcatggacatcgacccttataaagaatttggagctactgtggagttactctcgtttttgccttctgacttctttccttcagtacgagatcttctagataccgcctcagctctgtatcgggaagccttagagtctcctgagcattgttcacctcaccatactgcactcaggcaagcaattctttgctggggggaactaatgactctagctacctgggtgggtgttaatttggaagatccagcatctagagacctagtagtcagttatgtcaacactaatatgggcctaaagttcaggcaactcttgtggtttcacatttcttgtctcacttttggaagagaaaccgttatagagtatttggtgtctttcggagtgtggattcgcactcctccagcttatagaccaccaaatgcccctatcctatcaacacttccggaaactactgttgttagacgacgaggcaggtcccctagaagaagaactccctcgcctcgcagacgaaggtctcaatcgccgcgtcgcagaagatctcaatctcgggaacctcaatgttagtattccttggactcataaggtggggaactttactggtctttattcttctactgtacctgtctttaatcctcattggaaaacaccatcttttcctaatatacatttacaccaagacattatcaaaaaatgtgaacagtttgtaggcccacttacagttaatgagaaaagaagattgcaattgattatgcctgctaggttttatccaaaggttaccaaatatttaccattggataagggtattaaaccttattatccagaacatctagttaatcattacttccaaactagacactatttacacactctatggaaggcgggtatattatataagagagaaacaacacatagcgcctcattttgtgggtcaccatattcttgggaacaagatctacagcatggggcagaatctttccaccagcaatcctctgggattctttcccgaccaccagttggatccagccttcagagcaaacacagcaaatccagattgggacttcaatcccaacaaggacacctggccagacgccaacaaggtaggagctggagcattcgggctgggtttcaccccaccgcacggaggccttttggggtggagccctcaggctcagggcatactacaaactttgccagcaaatccgcctcctgcctccaccaatcgccagacaggaaggcagcctaccccgctgtctccacctttgagaaacactcatcctcaggccatgcagtgg

SEQ ID NO: 2 - DNA, 20 bp, synthetic construct
  source 1..20: mol_type = other DNA
  modified_base 1: mod_base = OTHER; note = 2'-O-methoxyethyl modified nucleotide with phosphorothioate linkage
  modified_base 2: mod_base = OTHER; note = 2'-O-methoxyethyl 5-methylcytosine with phosphorothioate linkage
  modified_base 3: mod_base = OTHER; note = 2'-O-methoxyethyl modified nucleotide with phosphorothioate linkage
  modified_base 4: mod_base = OTHER; note = 2'-O-methoxyethyl modified nucleotide with phosphorothioate linkage
  modified_base 5: mod_base = OTHER; note = 2'-O-methoxyethyl modified nucleotide with phosphorothioate linkage
  modified_base 6: mod_base = OTHER; note = Nucleotide with phosphorothioate linkage
  modified_base 7: mod_base = OTHER; note = Nucleotide with phosphorothioate linkage
  modified_base 8: mod_base = OTHER; note = Thymine with phosphorothioate linkage
  modified_base 9: mod_base = OTHER; note = Nucleotide with phosphorothioate linkage
  modified_base 10: mod_base = OTHER; note = Nucleotide with phosphorothioate linkage
  modified_base 11: mod_base = OTHER; note = Nucleotide with phosphorothioate linkage
  modified_base 12: mod_base = OTHER; note = Nucleotide with phosphorothioate linkage
  modified_base 13: mod_base = OTHER; note = 5-methylcytosine with phosphorothioate linkage
  modified_base 14: mod_base = OTHER; note = Nucleotide with phosphorothioate linkage
  modified_base 15: mod_base = OTHER; note = Nucleotide with phosphorothioate linkage
  modified_base 16: mod_base = OTHER; note = 2'-O-methoxyethyl modified nucleotide with phosphorothioate linkage
  modified_base 17: mod_base = OTHER; note = 2'-O-methoxyethyl modified nucleotide with phosphorothioate linkage
  modified_base 18: mod_base = OTHER; note = 2'-O-methoxyethyl modified thymine with phosphorothioate linkage
  modified_base 19: mod_base = OTHER; note = 2'-O-methoxyethyl modified nucleotide with phosphorothioate linkage
  modified_base 20: mod_base = OTHER; note = 2'-O-methoxyethyl 5-methylcytosine
  misc_feature 1..5: note = RNA
  misc_feature 6..15: note = DNA
  misc_feature 16..20: note = RNA
gcagaggtgaagcgaagtgc

SEQ ID NO: 3 - DNA, 20 bp, synthetic construct
  source 1..20: mol_type = other DNA
  modified_base 1: mod_base = OTHER; note = 2'-O-methoxyethyl modified nucleotide with phosphorothioate linkage
  modified_base 2: mod_base = OTHER; note = 2'-O-methoxyethyl modified thymine with phosphorothioate linkage
  modified_base 3: mod_base = OTHER; note = 2'-O-methoxyethyl modified nucleotide with phosphorothioate linkage
  modified_base 4: mod_base = OTHER; note = 2'-O-methoxyethyl modified nucleotide with phosphorothioate linkage
  modified_base 5: mod_base = OTHER; note = 2'-O-methoxyethyl modified nucleotide with phosphorothioate linkage
  modified_base 6: mod_base = OTHER; note = Nucleotide with phosphorothioate linkage
  modified_base 7: mod_base = OTHER; note = 5-methylcytosine with phosphorothioate linkage
  modified_base 8: mod_base = OTHER; note = Nucleotide with phosphorothioate linkage
  modified_base 9: mod_base = OTHER; note = Nucleotide with phosphorothioate linkage
  modified_base 10: mod_base = OTHER; note = Nucleotide with phosphorothioate linkage
  modified_base 11: mod_base = OTHER; note = Nucleotide with phosphorothioate linkage
  modified_base 12: mod_base = OTHER; note = Thymine with phosphorothioate linkage
  modified_base 13: mod_base = OTHER; note = Nucleotide with phosphorothioate linkage
  modified_base 14: mod_base = OTHER; note = 5-methylcytosine with phosphorothioate linkage
  modified_base 15: mod_base = OTHER; note = Nucleotide with phosphorothioate linkage
  modified_base 16: mod_base = OTHER; note = 2'-O-methoxyethyl 5-methylcytosine with phosphorothioate linkage
  modified_base 17: mod_base = OTHER; note = 2'-O-methoxyethyl modified nucleotide with phosphorothioate linkage
  modified_base 18: mod_base = OTHER; note = 2'-O-methoxyethyl 5-methylcytosine with phosphorothioate linkage
  modified_base 19: mod_base = OTHER; note = 2'-O-methoxyethyl modified nucleotide with phosphorothioate linkage
  modified_base 20: mod_base = OTHER; note = 2'-O-methoxyethyl modified nucleotide
  misc_feature 1..5: note = RNA
  misc_feature 6..15: note = DNA
  misc_feature 16..20: note = RNA
gtgaagcgaagtgcacacgg

SEQ ID NO: 4 - DNA, 20 bp, synthetic construct
  source 1..20: mol_type = other DNA
  modified_base 1: mod_base = OTHER; note = 2'-O-methoxyethyl modified nucleotide with phosphorothioate linkage
  modified_base 2: mod_base = OTHER; note = 2'-O-methoxyethyl modified nucleotide with phosphorothioate linkage
  modified_base 3: mod_base = OTHER; note = 2'-O-methoxyethyl modified thymine with phosphorothioate linkage
  modified_base 4: mod_base = OTHER; note = 2'-O-methoxyethyl modified nucleotide with phosphorothioate linkage
  modified_base 5: mod_base = OTHER; note = 2'-O-methoxyethyl modified nucleotide with phosphorothioate linkage
  modified_base 6: mod_base = OTHER; note = Nucleotide with phosphorothioate linkage
  modified_base 7: mod_base = OTHER; note = Nucleotide with phosphorothioate linkage
  modified_base 8: mod_base = OTHER; note = 5-methylcytosine with phosphorothioate linkage
  modified_base 9: mod_base = OTHER; note = Nucleotide with phosphorothioate linkage
  modified_base 10: mod_base = OTHER; note = Nucleotide with phosphorothioate linkage
  modified_base 11: mod_base = OTHER; note = Nucleotide with phosphorothioate linkage
  modified_base 12: mod_base = OTHER; note = Nucleotide with phosphorothioate linkage
  modified_base 13: mod_base = OTHER; note = Thymine with phosphorothioate linkage
  modified_base 14: mod_base = OTHER; note = Nucleotide with phosphorothioate linkage
  modified_base 15: mod_base = OTHER; note = 5-methylcytosine with phosphorothioate linkage
  modified_base 16: mod_base = OTHER; note = 2'-O-methoxyethyl modified nucleotide with phosphorothioate linkage
  modified_base 17: mod_base = OTHER; note = 2'-O-methoxyethyl 5-methylcytosine with phosphorothioate linkage
  modified_base 18: mod_base = OTHER; note = 2'-O-methoxyethyl modified nucleotide with phosphorothioate linkage
  modified_base 19: mod_base = OTHER; note = 2'-O-methoxyethyl 5-methylcytosine with phosphorothioate linkage
  modified_base 20: mod_base = OTHER; note = 2'-O-methoxyethyl modified nucleotide
  misc_feature 1..5: note = RNA
  misc_feature 6..15: note = DNA
  misc_feature 16..20: note = RNA
ggtgaagcgaagtgcacacg

SEQ ID NO: 5 - DNA, 20 bp, synthetic construct
  source 1..20: mol_type = other DNA
  modified_base 1: mod_base = OTHER; note = 2'-O-methoxyethyl modified nucleotide with phosphorothioate linkage
  modified_base 2: mod_base = OTHER; note = 2'-O-methoxyethyl modified nucleotide with phosphorothioate linkage
  modified_base 3: mod_base = OTHER; note = 2'-O-methoxyethyl modified nucleotide with phosphorothioate linkage
  modified_base 4: mod_base = OTHER; note = 2'-O-methoxyethyl modified thymine with phosphorothioate linkage
  modified_base 5: mod_base = OTHER; note = 2'-O-methoxyethyl modified nucleotide with phosphorothioate linkage
  modified_base 6: mod_base = OTHER; note = Nucleotide with phosphorothioate linkage
  modified_base 7: mod_base = OTHER; note = Nucleotide with phosphorothioate linkage
  modified_base 8: mod_base = OTHER; note = Nucleotide with phosphorothioate linkage
  modified_base 9: mod_base = OTHER; note = 5-methylcytosine with phosphorothioate linkage
  modified_base 10: mod_base = OTHER; note = Nucleotide with phosphorothioate linkage
  modified_base 11: mod_base = OTHER; note = Nucleotide with phosphorothioate linkage
  modified_base 12: mod_base = OTHER; note = Nucleotide with phosphorothioate linkage
  modified_base 13: mod_base = OTHER; note = Nucleotide with phosphorothioate linkage
  modified_base 14: mod_base = OTHER; note = Thymine with phosphorothioate linkage
  modified_base 15: mod_base = OTHER; note = Nucleotide with phosphorothioate linkage
  modified_base 16: mod_base = OTHER; note = 2'-O-methoxyethyl 5-methylcytosine with phosphorothioate linkage
  modified_base 17: mod_base = OTHER; note = 2'-O-methoxyethyl modified nucleotide with phosphorothioate linkage
  modified_base 18: mod_base = OTHER; note = 2'-O-methoxyethyl 5-methylcytosine with phosphorothioate linkage
  modified_base 19: mod_base = OTHER; note = 2'-O-methoxyethyl modified nucleotide with phosphorothioate linkage
  modified_base 20: mod_base = OTHER; note = 2'-O-methoxyethyl 5-methylcytosine
  misc_feature 1..5: note = RNA
  misc_feature 6..15: note = DNA
  misc_feature 16..20: note = RNA
aggtgaagcgaagtgcacac

SEQ ID NO: 6 - DNA, 20 bp, synthetic construct
  source 1..20: mol_type = other DNA
  modified_base 1: mod_base = OTHER; note = 2'-O-methoxyethyl modified nucleotide with phosphorothioate linkage
  modified_base 2: mod_base = OTHER; note = 2'-O-methoxyethyl modified nucleotide with phosphorothioate linkage
  modified_base 3: mod_base = OTHER; note = 2'-O-methoxyethyl modified nucleotide with phosphorothioate linkage
  modified_base 4: mod_base = OTHER; note = 2'-O-methoxyethyl modified nucleotide with phosphorothioate linkage
  modified_base 5: mod_base = OTHER; note = 2'-O-methoxyethyl modified nucleotide with phosphorothioate linkage
  modified_base 6: mod_base = OTHER; note = Thymine with phosphorothioate linkage
  modified_base 7: mod_base = OTHER; note = Nucleotide with phosphorothioate linkage
  modified_base 8: mod_base = OTHER; note = Nucleotide with phosphorothioate linkage
  modified_base 9: mod_base = OTHER; note = Nucleotide with phosphorothioate linkage
  modified_base 10: mod_base = OTHER; note = Nucleotide with phosphorothioate linkage
  modified_base 11: mod_base = OTHER; note = 5-methylcytosine with phosphorothioate linkage
  modified_base 12: mod_base = OTHER; note = Nucleotide with phosphorothioate linkage
  modified_base 13: mod_base = OTHER; note = Nucleotide with phosphorothioate linkage
  modified_base 14: mod_base = OTHER; note = Nucleotide with phosphorothioate linkage
  modified_base 15: mod_base = OTHER; note = Nucleotide with phosphorothioate linkage
  modified_base 16: mod_base = OTHER; note = 2'-O-methoxyethyl modified thymine with phosphorothioate linkage
  modified_base 17: mod_base = OTHER; note = 2'-O-methoxyethyl modified nucleotide with phosphorothioate linkage
  modified_base 18: mod_base = OTHER; note = 2'-O-methoxyethyl 5-methylcytosine with phosphorothioate linkage
  modified_base 19: mod_base = OTHER; note = 2'-O-methoxyethyl modified nucleotide with phosphorothioate linkage
  modified_base 20: mod_base = OTHER; note = 2'-O-methoxyethyl 5-methylcytosine
  misc_feature 1..5: note = RNA
  misc_feature 6..15: note = DNA
  misc_feature 16..20: note = RNA
agaggtgaagcgaagtgcac

SEQ ID NO: 7 - DNA, 20 bp, synthetic construct
  source 1..20: mol_type = other DNA
  modified_base 1: mod_base = OTHER; note = 2'-O-methoxyethyl 5-methylcytosine with phosphorothioate linkage
  modified_base 2: mod_base = OTHER; note = 2'-O-methoxyethyl modified nucleotide with phosphorothioate linkage
  modified_base 3: mod_base = OTHER; note = 2'-O-methoxyethyl modified nucleotide with phosphorothioate linkage
  modified_base 4: mod_base = OTHER; note = 2'-O-methoxyethyl modified nucleotide with phosphorothioate linkage
  modified_base 5: mod_base = OTHER; note = 2'-O-methoxyethyl modified nucleotide with phosphorothioate linkage
  modified_base 6: mod_base = OTHER; note = Nucleotide with phosphorothioate linkage
  modified_base 7: mod_base = OTHER; note = Thymine with phosphorothioate linkage
  modified_base 8: mod_base = OTHER; note = Nucleotide with phosphorothioate linkage
  modified_base 9: mod_base = OTHER; note = Nucleotide with phosphorothioate linkage
  modified_base 10: mod_base = OTHER; note = Nucleotide with phosphorothioate linkage
  modified_base 11: mod_base = OTHER; note = Nucleotide with phosphorothioate linkage
  modified_base 12: mod_base = OTHER; note = 5-methylcytosine with phosphorothioate linkage
  modified_base 13: mod_base = OTHER; note = Nucleotide with phosphorothioate linkage
  modified_base 14: mod_base = OTHER; note = Nucleotide with phosphorothioate linkage
  modified_base 15: mod_base = OTHER; note = Nucleotide with phosphorothioate linkage
  modified_base 16: mod_base = OTHER; note = 2'-O-methoxyethyl modified nucleotide with phosphorothioate linkage
  modified_base 17: mod_base = OTHER; note = 2'-O-methoxyethyl modified thymine with phosphorothioate linkage
  modified_base 18: mod_base = OTHER; note = 2'-O-methoxyethyl modified nucleotide with phosphorothioate linkage
  modified_base 19: mod_base = OTHER; note = 2'-O-methoxyethyl 5-methylcytosine with phosphorothioate linkage
  modified_base 20: mod_base = OTHER; note = 2'-O-methoxyethyl modified nucleotide
  misc_feature 1..5: note = RNA
  misc_feature 6..15: note = DNA
  misc_feature 16..20: note = RNA
cagaggtgaagcgaagtgca

SEQ ID NO: 8 - DNA, 20 bp, synthetic construct
  source 1..20: mol_type = other DNA
  modified_base 1: mod_base = OTHER; note = 2'-O-methoxyethyl modified thymine with phosphorothioate linkage
  modified_base 2: mod_base = OTHER; note = 2'-O-methoxyethyl modified nucleotide with phosphorothioate linkage
  modified_base 3: mod_base = OTHER; note = 2'-O-methoxyethyl 5-methylcytosine with phosphorothioate linkage
  modified_base 4: mod_base = OTHER; note = 2'-O-methoxyethyl modified nucleotide with phosphorothioate linkage
  modified_base 5: mod_base = OTHER; note = 2'-O-methoxyethyl modified nucleotide with phosphorothioate linkage
  modified_base 6: mod_base = OTHER; note = Nucleotide with phosphorothioate linkage
  modified_base 7: mod_base = OTHER; note = Nucleotide with phosphorothioate linkage
  modified_base 8: mod_base = OTHER; note = Nucleotide with phosphorothioate linkage
  modified_base 9: mod_base = OTHER; note = Thymine with phosphorothioate linkage
  modified_base 10: mod_base = OTHER; note = Nucleotide with phosphorothioate linkage
  modified_base 11: mod_base = OTHER; note = Nucleotide with phosphorothioate linkage
  modified_base 12: mod_base = OTHER; note = Nucleotide with phosphorothioate linkage
  modified_base 13: mod_base = OTHER; note = Nucleotide with phosphorothioate linkage
  modified_base 14: mod_base = OTHER; note = 5-methylcytosine with phosphorothioate linkage
  modified_base 15: mod_base = OTHER; note = Nucleotide with phosphorothioate linkage
  modified_base 16: mod_base = OTHER; note = 2'-O-methoxyethyl modified nucleotide with phosphorothioate linkage
  modified_base 17: mod_base = OTHER; note = 2'-O-methoxyethyl modified nucleotide with phosphorothioate linkage
  modified_base 18: mod_base = OTHER; note = 2'-O-methoxyethyl modified nucleotide with phosphorothioate linkage
  modified_base 19: mod_base = OTHER; note = 2'-O-methoxyethyl modified thymine with phosphorothioate linkage
  modified_base 20: mod_base = OTHER; note = 2'-O-methoxyethyl modified nucleotide
  misc_feature 1..5: note = RNA
  misc_feature 6..15: note = DNA
  misc_feature 16..20: note = RNA
tgcagaggtgaagcgaagtg

SEQ ID NO: 9 - DNA, 20 bp, synthetic construct
  source 1..20: mol_type = other DNA
  modified_base 1: mod_base = OTHER; note = 2'-O-methoxyethyl 5-methylcytosine with phosphorothioate linkage
  modified_base 2: mod_base = OTHER; note = 2'-O-methoxyethyl modified nucleotide with phosphorothioate linkage
  modified_base 3: mod_base = OTHER; note = 2'-O-methoxyethyl modified thymine with phosphorothioate linkage
  modified_base 4: mod_base = OTHER; note = 2'-O-methoxyethyl modified nucleotide with phosphorothioate linkage
  modified_base 5: mod_base = OTHER; note = 2'-O-methoxyethyl 5-methylcytosine with phosphorothioate linkage
  modified_base 6: mod_base = OTHER; note = Nucleotide with phosphorothioate linkage
  modified_base 7: mod_base = OTHER; note = Nucleotide with phosphorothioate linkage
  modified_base 8: mod_base = OTHER; note = Nucleotide with phosphorothioate linkage
  modified_base 9: mod_base = OTHER; note = Nucleotide with phosphorothioate linkage
  modified_base 10: mod_base = OTHER; note = Nucleotide with phosphorothioate linkage
  modified_base 11: mod_base = OTHER; note = Thymine with phosphorothioate linkage
  modified_base 12: mod_base = OTHER; note = Nucleotide with phosphorothioate linkage
  modified_base 13: mod_base = OTHER; note = Nucleotide with phosphorothioate linkage
  modified_base 14: mod_base = OTHER; note = Nucleotide with phosphorothioate linkage
  modified_base 15: mod_base = OTHER; note = Nucleotide with phosphorothioate linkage
  modified_base 16: mod_base = OTHER; note = 2'-O-methoxyethyl 5-methylcytosine with phosphorothioate linkage
  modified_base 17: mod_base = OTHER; note = 2'-O-methoxyethyl modified nucleotide with phosphorothioate linkage
  modified_base 18: mod_base = OTHER; note = 2'-O-methoxyethyl modified nucleotide with phosphorothioate linkage
  modified_base 19: mod_base = OTHER; note = 2'-O-methoxyethyl modified nucleotide with phosphorothioate linkage
  modified_base 20: mod_base = OTHER; note = 2'-O-methoxyethyl modified nucleotide
  misc_feature 1..5: note = RNA
  misc_feature 6..15: note = DNA
  misc_feature 16..20: note = RNA
cgtgcagaggtgaagcgaag

SEQ ID NO: 10 - DNA, 20 bp, synthetic construct
  source 1..20: mol_type = other DNA
  modified_base 1: mod_base = OTHER; note = 2'-O-methoxyethyl modified nucleotide with phosphorothioate linkage
  modified_base 2: mod_base = OTHER; note = 2'-O-methoxyethyl 5-methylcytosine with phosphorothioate linkage
  modified_base 3: mod_base = OTHER; note = 2'-O-methoxyethyl modified nucleotide with phosphorothioate linkage
  modified_base 4: mod_base = OTHER; note = 2'-O-methoxyethyl modified thymine with phosphorothioate linkage
  modified_base 5: mod_base = OTHER; note = 2'-O-methoxyethyl modified nucleotide with phosphorothioate linkage
  modified_base 6: mod_base = OTHER; note = 5-methylcytosine with phosphorothioate linkage
  modified_base 7: mod_base = OTHER; note = Nucleotide with phosphorothioate linkage
  modified_base 8: mod_base = OTHER; note = Nucleotide with phosphorothioate linkage
  modified_base 9: mod_base = OTHER; note = Nucleotide with phosphorothioate linkage
  modified_base 10: mod_base = OTHER; note = Nucleotide with phosphorothioate linkage
  modified_base 11: mod_base = OTHER; note = Nucleotide with phosphorothioate linkage
  modified_base 12: mod_base = OTHER; note = Thymine with phosphorothioate linkage
  modified_base 13: mod_base = OTHER; note = Nucleotide with phosphorothioate linkage
  modified_base 14: mod_base = OTHER; note = Nucleotide with phosphorothioate linkage
  modified_base 15: mod_base = OTHER; note = Nucleotide with phosphorothioate linkage
  modified_base 16: mod_base = OTHER; note = 2'-O-methoxyethyl modified nucleotide with phosphorothioate linkage
  modified_base 17: mod_base = OTHER; note = 2'-O-methoxyethyl 5-methylcytosine with phosphorothioate linkage
  modified_base 18: mod_base = OTHER; note = 2'-O-methoxyethyl modified nucleotide with phosphorothioate linkage
  modified_base 19: mod_base = OTHER; note = 2'-O-methoxyethyl modified nucleotide with phosphorothioate linkage
  modified_base 20: mod_base = OTHER; note = 2'-O-methoxyethyl modified nucleotide
  misc_feature 1..5: note = RNA
  misc_feature 6..15: note = DNA
  misc_feature 16..20: note = RNA
acgtgcagaggtgaagcgaa

SEQ ID NO: 11 - DNA, 20 bp, synthetic construct
  source 1..20: mol_type = other DNA
  modified_base 1: mod_base = OTHER; note = 2'-O-methoxyethyl modified nucleotide with phosphorothioate linkage
  modified_base 2: mod_base = OTHER; note = 2'-O-methoxyethyl modified nucleotide with phosphorothioate linkage
  modified_base 3: mod_base = OTHER; note = 2'-O-methoxyethyl modified nucleotide with phosphorothioate linkage
  modified_base 4: mod_base = OTHER; note = 2'-O-methoxyethyl 5-methylcytosine with phosphorothioate linkage
  modified_base 5: mod_base = OTHER; note = 2'-O-methoxyethyl modified nucleotide with phosphorothioate linkage
  modified_base 6: mod_base = OTHER; note = 5-methylcytosine with phosphorothioate linkage
  modified_base 7: mod_base = OTHER; note = 5-methylcytosine with phosphorothioate linkage
  modified_base 8: mod_base = OTHER; note = Nucleotide with phosphorothioate linkage
  modified_base 9: mod_base = OTHER; note = 5-methylcytosine with phosphorothioate linkage
  modified_base 10: mod_base = OTHER; note = Nucleotide with phosphorothioate linkage
  modified_base 11: mod_base = OTHER; note = Nucleotide with phosphorothioate linkage
  modified_base 12: mod_base = OTHER; note = Nucleotide with phosphorothioate linkage
  modified_base 13: mod_base = OTHER; note = 5-methylcytosine with phosphorothioate linkage
  modified_base 14: mod_base = OTHER; note = Nucleotide with phosphorothioate linkage
  modified_base 15: mod_base = OTHER; note = 5-methylcytosine with phosphorothioate linkage
  modified_base 16: mod_base = OTHER; note = 2'-O-methoxyethyl modified nucleotide with phosphorothioate linkage
  modified_base 17: mod_base = OTHER; note = 2'-O-methoxyethyl modified thymine with phosphorothioate linkage
  modified_base 18: mod_base = OTHER; note = 2'-O-methoxyethyl 5-methylcytosine with phosphorothioate linkage
  modified_base 19: mod_base = OTHER; note = 2'-O-methoxyethyl 5-methylcytosine with phosphorothioate linkage
  modified_base 20: mod_base = OTHER; note = 2'-O-methoxyethyl modified nucleotide
  misc_feature 1..5: note = RNA
  misc_feature 6..15: note = DNA
  misc_feature 16..20: note = RNA
aaacgccgcagacacatcca

SEQ ID NO: 12 - DNA, 19 bp, synthetic construct
  source 1..19: mol_type = other DNA
  modified_base 1: mod_base = OTHER; note = 2'-O-methoxyethyl modified nucleotide with phosphorothioate linkage
  modified_base 2: mod_base = OTHER; note = 2'-O-methoxyethyl modified nucleotide with phosphorothioate linkage
  modified_base 3: mod_base = OTHER; note = 2'-O-methoxyethyl modified nucleotide with phosphorothioate linkage
  modified_base 4: mod_base = OTHER; note = 2'-O-methoxyethyl modified nucleotide with phosphorothioate linkage
  modified_base 5: mod_base = OTHER; note = 2'-O-methoxyethyl 5-methylcytosine with phosphorothioate linkage
  modified_base 6: mod_base = OTHER; note = Nucleotide with phosphorothioate linkage
  modified_base 7: mod_base = OTHER; note = 5-methylcytosine with phosphorothioate linkage
  modified_base 8: mod_base = OTHER; note = Nucleotide with phosphorothioate linkage
  modified_base 9: mod_base = OTHER; note = 5-methylcytosine with phosphorothioate linkage
  modified_base 10: mod_base = OTHER; note = Nucleotide with phosphorothioate linkage
  modified_base 11: mod_base = OTHER; note = Nucleotide with phosphorothioate linkage
  modified_base 12: mod_base = OTHER; note = Nucleotide with phosphorothioate linkage
  modified_base 13: mod_base = OTHER; note = 5-methylcytosine with phosphorothioate linkage
  modified_base 14: mod_base = OTHER; note = Nucleotide with phosphorothioate linkage
  modified_base 15: mod_base = OTHER; note = 2'-O-methoxyethyl 5-methylcytosine with phosphorothioate linkage
  modified_base 16: mod_base = OTHER; note = 2'-O-methoxyethyl modified nucleotide with phosphorothioate linkage
  modified_base 17: mod_base = OTHER; note = 2'-O-methoxyethyl modified thymine with phosphorothioate linkage
  modified_base 18: mod_base = OTHER; note = 2'-O-methoxyethyl 5-methylcytosine with phosphorothioate linkage
  modified_base 19: mod_base = OTHER; note = 2'-O-methoxyethyl 5-methylcytosine
  misc_feature 1..5: note = RNA
  misc_feature 6..14: note = DNA
  misc_feature 15..19: note = RNA
aaaacgcgcagacacatcc

SEQ ID NO: 13 - DNA, 20 bp, synthetic construct
  source 1..20: mol_type = other DNA
  modified_base 1: mod_base = OTHER; note = 2'-O-methoxyethyl modified thymine with phosphorothioate linkage
  modified_base 2: mod_base = OTHER; note = 2'-O-methoxyethyl modified nucleotide with phosphorothioate linkage
  modified_base 3: mod_base = OTHER; note = 2'-O-methoxyethyl modified nucleotide with phosphorothioate linkage
  modified_base 4: mod_base = OTHER; note = 2'-O-methoxyethyl modified nucleotide with phosphorothioate linkage
  modified_base 5: mod_base = OTHER; note = 2'-O-methoxyethyl modified nucleotide with phosphorothioate linkage
  modified_base 6: mod_base = OTHER; note = 5-methylcytosine with phosphorothioate linkage
  modified_base 7: mod_base = OTHER; note = Nucleotide with phosphorothioate linkage
  modified_base 8: mod_base = OTHER; note = 5-methylcytosine with phosphorothioate linkage
  modified_base 9: mod_base = OTHER; note = 5-methylcytosine with phosphorothioate linkage
  modified_base 10: mod_base = OTHER; note = Nucleotide with phosphorothioate linkage
  modified_base 11: mod_base = OTHER; note = 5-methylcytosine with phosphorothioate linkage
  modified_base 12: mod_base = OTHER; note = Nucleotide with phosphorothioate linkage
  modified_base 13: mod_base = OTHER; note = Nucleotide with phosphorothioate linkage
  modified_base 14: mod_base = OTHER; note = Nucleotide with phosphorothioate linkage
  modified_base 15: mod_base = OTHER; note = 5-methylcytosine with phosphorothioate linkage
  modified_base 16: mod_base = OTHER; note = 2'-O-methoxyethyl modified nucleotide with phosphorothioate linkage
  modified_base 17: mod_base = OTHER; note = 2'-O-methoxyethyl 5-methylcytosine with phosphorothioate linkage
  modified_base 18: mod_base = OTHER; note = 2'-O-methoxyethyl modified nucleotide with phosphorothioate linkage
  modified_base 19: mod_base = OTHER; note = 2'-O-methoxyethyl modified thymine with phosphorothioate linkage
  modified_base 20: mod_base = OTHER; note = 2'-O-methoxyethyl 5-methylcytosine
  misc_feature 1..5: note = RNA
  misc_feature 6..15: note = DNA
  misc_feature 16..20: note = RNA
taaaacgccgcagacacatc

SEQ ID NO: 14 - DNA, 21 bp, synthetic construct
  source 1..21: mol_type = other DNA
  modified_base 1: mod_base = OTHER; note = 2'-O-methoxyethyl modified nucleotide with phosphorothioate linkage
  modified_base 2: mod_base = OTHER; note = 2'-O-methoxyethyl modified thymine with phosphorothioate linkage
  modified_base 3: mod_base = OTHER; note = 2'-O-methoxyethyl modified nucleotide with phosphorothioate linkage
  modified_base 4: mod_base = OTHER; note = 2'-O-methoxyethyl modified nucleotide with phosphorothioate linkage
  modified_base 5: mod_base = OTHER; note = 2'-O-methoxyethyl modified nucleotide with phosphorothioate linkage
  modified_base 6: mod_base = OTHER; note = Nucleotide with phosphorothioate linkage
  modified_base 7: mod_base = OTHER; note = 5-methylcytosine with phosphorothioate linkage
  modified_base 8: mod_base = OTHER; note = Nucleotide with phosphorothioate linkage
  modified_base 9: mod_base = OTHER; note = 5-methylcytosine with phosphorothioate linkage
  modified_base 10: mod_base = OTHER; note = 5-methylcytosine with phosphorothioate linkage
  modified_base 11: mod_base = OTHER; note = Nucleotide with phosphorothioate linkage
  modified_base 12: mod_base = OTHER; note = 5-methylcytosine with phosphorothioate linkage
  modified_base 13: mod_base = OTHER; note = Nucleotide with phosphorothioate linkage
  modified_base 14: mod_base = OTHER; note = Nucleotide with phosphorothioate linkage
  modified_base 15: mod_base = OTHER; note = Nucleotide with phosphorothioate linkage
  modified_base 16: mod_base = OTHER; note = 5-methylcytosine with phosphorothioate linkage
  modified_base 17: mod_base = OTHER; note = 2'-O-methoxyethyl modified nucleotide with phosphorothioate linkage
  modified_base 18: mod_base = OTHER; note = 2'-O-methoxyethyl 5-methylcytosine with phosphorothioate linkage
  modified_base 19: mod_base = OTHER; note = 2'-O-methoxyethyl modified nucleotide with phosphorothioate linkage
  modified_base 20: mod_base = OTHER; note = 2'-O-methoxyethyl modified thymine with phosphorothioate linkage
  modified_base 21: mod_base = OTHER; note = 2'-O-methoxyethyl 5-methylcytosine
  misc_feature 1..5: note = RNA
  misc_feature 6..16: note = DNA
  misc_feature 17..21: note = RNA
ataaaacgccgcagacacatc

SEQ ID NO: 15 - DNA, 21 bp, synthetic construct
  source 1..21: mol_type = other DNA
  modified_base 1: mod_base = OTHER; note = 2'-O-methoxyethyl modified nucleotide with phosphorothioate linkage
  modified_base 2: mod_base = OTHER; note = 2'-O-methoxyethyl modified nucleotide with phosphorothioate linkage
  modified_base 3: mod_base = OTHER; note = 2'-O-methoxyethyl modified thymine with phosphorothioate linkage
  modified_base 4: mod_base = OTHER; note = 2'-O-methoxyethyl modified nucleotide with phosphorothioate linkage
  modified_base 5: mod_base = OTHER; note = 2'-O-methoxyethyl modified nucleotide with phosphorothioate linkage
  modified_base 6: mod_base = OTHER; note = Nucleotide with phosphorothioate linkage
  modified_base 7: mod_base = OTHER; note = Nucleotide with phosphorothioate linkage
  modified_base 8: mod_base = OTHER; note = 5-methylcytosine with phosphorothioate linkage
  modified_base 9: mod_base = OTHER; note = Nucleotide with phosphorothioate linkage
  modified_base 10: mod_base = OTHER; note = 5-methylcytosine with phosphorothioate linkage
  modified_base 11: mod_base = OTHER; note = 5-methylcytosine with phosphorothioate linkage
  modified_base 12: mod_base = OTHER; note = Nucleotide with phosphorothioate linkage
  modified_base 13: mod_base = OTHER; note = 5-methylcytosine with phosphorothioate linkage
  modified_base 14: mod_base = OTHER; note = Nucleotide with phosphorothioate linkage
  modified_base 15: mod_base = OTHER; note = Nucleotide with phosphorothioate linkage
  modified_base 16: mod_base = OTHER; note = Nucleotide with phosphorothioate linkage
  modified_base 17: mod_base = OTHER; note = 2'-O-methoxyethyl 5-methylcytosine with phosphorothioate linkage
  modified_base 18: mod_base = OTHER; note = 2'-O-methoxyethyl modified nucleotide with phosphorothioate linkage
  modified_base 19: mod_base = OTHER; note = 2'-O-methoxyethyl 5-methylcytosine with phosphorothioate linkage
  modified_base 20: mod_base = OTHER; note = 2'-O-methoxyethyl modified nucleotide with phosphorothioate linkage
  modified_base 21: mod_base = OTHER; note = 2'-O-methoxyethyl thymine
  misc_feature 1..5: note = RNA
  misc_feature 6..16: note = DNA
  misc_feature 17..21: note = RNA
gataaaacgccgcagacacat

SEQ ID NO: 16 - DNA, 20 bp, synthetic construct
  source 1..20: mol_type = other DNA
  modified_base 1: mod_base = OTHER; note = 2'-O-methoxyethyl modified thymine with phosphorothioate linkage
  modified_base 2: mod_base = OTHER; note = 2'-O-methoxyethyl modified nucleotide with phosphorothioate linkage
  modified_base 3: mod_base = OTHER; note = 2'-O-methoxyethyl modified nucleotide with phosphorothioate linkage
  modified_base 4: mod_base = OTHER; note = 2'-O-methoxyethyl modified thymine with phosphorothioate linkage
  modified_base 5: mod_base = OTHER; note = 2'-O-methoxyethyl modified nucleotide with phosphorothioate linkage
  modified_base 6: mod_base = OTHER; note = Nucleotide with phosphorothioate linkage
  modified_base 7: mod_base = OTHER; note = Nucleotide with phosphorothioate linkage
  modified_base 8: mod_base = OTHER; note = Nucleotide with phosphorothioate linkage
  modified_base 9: mod_base = OTHER; note = 5-methylcytosine with phosphorothioate linkage
  modified_base 10: mod_base = OTHER; note = Nucleotide with phosphorothioate linkage
  modified_base 11: mod_base = OTHER; note = 5-methylcytosine with phosphorothioate linkage
  modified_base 12: mod_base = OTHER; note = 5-methylcytosine with phosphorothioate linkage
  modified_base 13: mod_base = OTHER; note = Nucleotide with phosphorothioate linkage
  modified_base 14: mod_base = OTHER; note = 5-methylcytosine with phosphorothioate linkage
  modified_base 15: mod_base = OTHER; note = Nucleotide with phosphorothioate linkage
  modified_base 16: mod_base = OTHER; note = 2'-O-methoxyethyl modified nucleotide with phosphorothioate linkage
  modified_base 17: mod_base = OTHER; note = 2'-O-methoxyethyl modified nucleotide with phosphorothioate linkage
  modified_base 18: mod_base = OTHER; note = 2'-O-methoxyethyl 5-methylcytosine with phosphorothioate linkage
  modified_base 19: mod_base = OTHER; note = 2'-O-methoxyethyl modified nucleotide with phosphorothioate linkage
  modified_base 20: mod_base = OTHER; note = 2'-O-methoxyethyl 5-methylcytosine
  misc_feature 1..5: note = RNA
  misc_feature 6..15: note = DNA
  misc_feature 16..20: note = RNA
tgataaaacgccgcagacac

SEQ ID NO: 17 - DNA, 20 bp, synthetic construct
  source 1..20: mol_type = other DNA
  modified_base 1: mod_base = OTHER; note = 2'-O-methoxyethyl modified nucleotide with phosphorothioate linkage
  modified_base 2: mod_base = OTHER; note = 2'-O-methoxyethyl modified thymine with phosphorothioate linkage
  modified_base 3: mod_base = OTHER; note = 2'-O-methoxyethyl modified nucleotide with phosphorothioate linkage
  modified_base 4: mod_base = OTHER; note = 2'-O-methoxyethyl modified nucleotide with phosphorothioate linkage
  modified_base 5: mod_base = OTHER; note = 2'-O-methoxyethyl modified thymine with phosphorothioate linkage
  modified_base 6: mod_base = OTHER; note = Nucleotide with phosphorothioate linkage
  modified_base 7: mod_base = OTHER; note = Nucleotide with phosphorothioate linkage
  modified_base 8: mod_base = OTHER; note = Nucleotide with phosphorothioate linkage
  modified_base 9: mod_base = OTHER; note = Nucleotide with phosphorothioate linkage
  modified_base 10: mod_base = OTHER; note = 5-methylcytosine with phosphorothioate linkage
  modified_base 11: mod_base = OTHER; note = Nucleotide with phosphorothioate linkage
  modified_base 12: mod_base = OTHER; note = 5-methylcytosine with phosphorothioate linkage
  modified_base 13: mod_base = OTHER; note = 5-methylcytosine with phosphorothioate linkage
  modified_base 14: mod_base = OTHER; note = Nucleotide with phosphorothioate linkage
  modified_base 15: mod_base = OTHER; note = 5-methylcytosine with phosphorothioate linkage
  modified_base 16: mod_base = OTHER; note = 2'-O-methoxyethyl modified nucleotide with phosphorothioate linkage
  modified_base 17: mod_base = OTHER; note = 2'-O-methoxyethyl modified nucleotide with phosphorothioate linkage
  modified_base 18: mod_base = OTHER; note = 2'-O-methoxyethyl modified nucleotide with phosphorothioate linkage
  modified_base 19: mod_base = OTHER; note = 2'-O-methoxyethyl 5-methylcytosine with phosphorothioate linkage
  modified_base 20: mod_base = OTHER; note = 2'-O-methoxyethyl modified nucleotide
  misc_feature 1..5: note = RNA
  misc_feature 6..15: note = DNA
  misc_feature 16..20: note = RNA
atgataaaacgccgcagaca

SEQ ID NO: 18 - RNA, 20 nt, synthetic construct
  source 1..20: mol_type = other RNA
  modified_base 1: mod_base = OTHER; note = 2'-O-methyl modified nucleotide with phosphorothioate linkage
  modified_base 2: mod_base = OTHER; note = 2'-O-methyl modified nucleotide with phosphorothioate linkage
  modified_base 3: mod_base = OTHER; note = 2'-O-methyl modified nucleotide with phosphorothioate linkage
  modified_base 4: mod_base = OTHER; note = 2'-O-methyl modified nucleotide with phosphorothioate linkage
  modified_base 5: mod_base = OTHER; note = 2'-O-methyl modified nucleotide with phosphorothioate linkage
  modified_base 15: mod_base = OTHER; note = Nucleotide with phosphorothioate linkage
  modified_base 16: mod_base = OTHER; note = 2'-O-methyl modified nucleotide with phosphorothioate linkage
  modified_base 17: mod_base = OTHER; note = 2'-O-methyl modified nucleotide with phosphorothioate linkage
  modified_base 18: mod_base = OTHER; note = 2'-O-methyl modified nucleotide with phosphorothioate linkage
  modified_base 19: mod_base = OTHER; note = 2'-O-methyl modified nucleotide with phosphorothioate linkage
  modified_base 20: mod_base = OTHER; note = 2'-O-methyl modified nucleotide
cgtctccacttcgcttcacg

SEQ ID NO: 19 - DNA, 20 bp, synthetic construct
  source 1..20: mol_type = other DNA
  modified_base 1: mod_base = OTHER; note = 2'-O-methoxyethyl modified nucleotide with phosphorothioate linkage
  modified_base 2: mod_base = OTHER; note = 2'-O-methoxyethyl 5-methylcytosine with phosphorothioate linkage
  modified_base 3: mod_base = OTHER; note = 2'-O-methoxyethyl modified nucleotide with phosphorothioate linkage
  modified_base 4: mod_base = OTHER; note = 2'-O-methoxyethyl modified nucleotide with phosphorothioate linkage
  modified_base 5: mod_base = OTHER; note = 2'-O-methoxyethyl modified nucleotide with phosphorothioate linkage
  modified_base 6: mod_base = OTHER; note = 2'-O-methyl modified nucleotide with phosphorothioate linkage
  modified_base 7: mod_base = OTHER; note = 2'-O-methyl modified nucleotide with phosphorothioate linkage
  modified_base 8: mod_base = OTHER; note = Thymine with phosphorothioate linkage
  modified_base 9: mod_base = OTHER; note = Nucleotide with phosphorothioate linkage
  modified_base 10: mod_base = OTHER; note = Nucleotide with phosphorothioate linkage
  modified_base 11: mod_base = OTHER; note = Nucleotide with phosphorothioate linkage
  modified_base 12: mod_base = OTHER; note = Nucleotide with phosphorothioate linkage
  modified_base 13: mod_base = OTHER; note = 5-methylcytosine with phosphorothioate linkage
  modified_base 14: mod_base = OTHER; note = Nucleotide with phosphorothioate linkage
  modified_base 15: mod_base = OTHER; note = Nucleotide with phosphorothioate linkage
  modified_base 16: mod_base = OTHER; note = 2'-O-methoxyethyl modified nucleotide with phosphorothioate linkage
  modified_base 17: mod_base = OTHER; note = 2'-O-methoxyethyl modified nucleotide with phosphorothioate linkage
  modified_base 18: mod_base = OTHER; note = 2'-O-methoxyethyl modified thymine with phosphorothioate linkage
  modified_base 19: mod_base = OTHER; note = 2'-O-methoxyethyl modified nucleotide with phosphorothioate linkage
  modified_base 20: mod_base = OTHER; note = 2'-O-methoxyethyl 5-methylcytosine
  misc_feature 1..7: note = RNA
  misc_feature 8..15: note = DNA
  misc_feature 16..20: note = RNA
gcagaggtgaagcgaagtgc

SEQ ID NO: 20 - DNA, 20 bp, synthetic construct
  source 1..20: mol_type = other DNA
  modified_base 1: mod_base = OTHER; note = 2'-O-methoxyethyl modified nucleotide with phosphorothioate linkage
  modified_base 2: mod_base = OTHER; note = 2'-O-methoxyethyl 5-methylcytosine with phosphorothioate linkage
  modified_base 3: mod_base = OTHER; note = 2'-O-methoxyethyl modified nucleotide with phosphorothioate linkage
  modified_base 4: mod_base = OTHER; note = 2'-O-methoxyethyl modified nucleotide with phosphorothioate linkage
  modified_base 5: mod_base = OTHER; note = 2'-O-methoxyethyl modified nucleotide with phosphorothioate linkage
  modified_base 6: mod_base = OTHER; note = Nucleotide with phosphorothioate linkage
  modified_base 7: mod_base = OTHER; note = Nucleotide with phosphorothioate linkage
  modified_base 8: mod_base = OTHER; note = Thymine with phosphorothioate linkage
  modified_base 9: mod_base = OTHER; note = Nucleotide with phosphorothioate linkage
  modified_base 10: mod_base = OTHER; note = Nucleotide with phosphorothioate linkage
  modified_base 11: mod_base = OTHER; note = Nucleotide with phosphorothioate linkage
  modified_base 12: mod_base = OTHER; note = Nucleotide with phosphorothioate linkage
  modified_base 13: mod_base = OTHER; note = 5-methylcytosine with phosphorothioate linkage
  modified_base 14: mod_base = OTHER; note = Nucleotide with phosphorothioate linkage
  modified_base 15: mod_base = OTHER; note = Nucleotide with phosphorothioate linkage
  modified_base 16: mod_base = OTHER; note = 2'-O-methoxyethyl modified nucleotide with phosphorothioate linkage
  modified_base 17: mod_base = OTHER; note = 2'-O-methoxyethyl modified nucleotide with phosphorothioate linkage
  modified_base 18: mod_base = OTHER; note = 2'-O-methoxyethyl modified thymine with phosphorothioate linkage
  modified_base 19: mod_base = OTHER; note = 2'-O-methoxyethyl modified nucleotide with phosphorothioate linkage
  modified_base 20: mod_base = OTHER; note = 2'-O-methoxyethyl 5-methylcytosine
  misc_feature 1..7: note = RNA
  misc_feature 8..15: note = DNA
  misc_feature 16..20: note = RNA
gcagaggtgaagcgaagtgc

SEQ ID NO: 21 - DNA, 23 bp, synthetic construct
  source 1..23: mol_type = other DNA
  modified_base 1: mod_base = OTHER; note = Nucleotide with phosphorothioate linkage
  modified_base 4: mod_base = OTHER; note = 2'-O-methoxyethyl modified nucleotide with phosphorothioate linkage
  modified_base 5: mod_base = OTHER; note = 2'-O-methoxyethyl 5-methylcytosine with phosphorothioate linkage
  modified_base 6: mod_base = OTHER; note = 2'-O-methoxyethyl modified nucleotide with phosphorothioate linkage
  modified_base 7: mod_base = OTHER; note = 2'-O-methoxyethyl modified nucleotide with phosphorothioate linkage
  modified_base 8: mod_base = OTHER; note = 2'-O-methoxyethyl modified nucleotide with phosphorothioate linkage
  modified_base 9: mod_base = OTHER; note = Nucleotide with phosphorothioate linkage
  modified_base 10: mod_base = OTHER; note = Nucleotide with phosphorothioate linkage
  modified_base 11: mod_base = OTHER; note = Thymine with phosphorothioate linkage
  modified_base 12: mod_base = OTHER; note = Nucleotide with phosphorothioate linkage
  modified_base 13: mod_base = OTHER; note = Nucleotide with phosphorothioate linkage
  modified_base 14: mod_base = OTHER; note = Nucleotide with phosphorothioate linkage
  modified_base 15: mod_base = OTHER; note = Nucleotide with phosphorothioate linkage
  modified_base 16: mod_base = OTHER; note = 5-methylcytosine with phosphorothioate linkage
  modified_base 17: mod_base = OTHER; note = Nucleotide with phosphorothioate linkage
  modified_base 18: mod_base = OTHER; note = Nucleotide with phosphorothioate linkage
  modified_base 19: mod_base = OTHER; note = 2'-O-methoxyethyl modified nucleotide with phosphorothioate linkage
  modified_base 20: mod_base = OTHER; note = 2'-O-methoxyethyl modified nucleotide with phosphorothioate linkage
  modified_base 21: mod_base = OTHER; note = 2'-O-methoxyethyl modified thymine with phosphorothioate linkage
  modified_base 22: mod_base = OTHER; note = 2'-O-methoxyethyl modified nucleotide with phosphorothioate linkage
  modified_base 23: mod_base = OTHER; note = 2'-O-methoxyethyl 5-methylcytosine
  misc_feature 1..8: note = RNA
  misc_feature 9..18: note = DNA
  misc_feature 19..23: note = RNA
ttggcagaggtgaagcgaagtgc

SEQ ID NO: 22 - DNA, 23 bp, synthetic construct
  source 1..23: mol_type = other DNA
  modified_base 2: mod_base = OTHER; note = Nucleotide with phosphorothioate linkage
  modified_base 4: mod_base = OTHER; note = 2'-O-methoxyethyl modified nucleotide with phosphorothioate linkage
  modified_base 5: mod_base = OTHER; note = 2'-O-methoxyethyl 5-methylcytosine with phosphorothioate linkage
  modified_base 6: mod_base = OTHER; note = 2'-O-methoxyethyl modified nucleotide with phosphorothioate linkage
  modified_base 7: mod_base = OTHER; note = 2'-O-methoxyethyl modified nucleotide with phosphorothioate linkage
  modified_base 8: mod_base = OTHER; note = 2'-O-methoxyethyl modified nucleotide with phosphorothioate linkage
  modified_base 9: mod_base = OTHER; note = Nucleotide with phosphorothioate linkage
  modified_base 10: mod_base = OTHER; note = Nucleotide with phosphorothioate linkage
  modified_base 11: mod_base = OTHER; note = Thymine with phosphorothioate linkage
  modified_base 12: mod_base = OTHER; note = Nucleotide with phosphorothioate linkage
  modified_base 13: mod_base = OTHER; note = Nucleotide with phosphorothioate linkage
  modified_base 14: mod_base = OTHER; note = Nucleotide with phosphorothioate linkage
  modified_base 15: mod_base = OTHER; note = Nucleotide with phosphorothioate linkage
  modified_base 16: mod_base = OTHER; note = 5-methylcytosine with phosphorothioate linkage
  modified_base 17: mod_base = OTHER; note = Nucleotide with phosphorothioate linkage
  modified_base 18: mod_base = OTHER; note = Nucleotide with phosphorothioate linkage
  modified_base 19: mod_base = OTHER; note = 2'-O-methoxyethyl modified nucleotide with phosphorothioate linkage
  modified_base 20: mod_base = OTHER; note = 2'-O-methoxyethyl modified nucleotide with phosphorothioate linkage
  modified_base 21: mod_base = OTHER; note = 2'-O-methoxyethyl modified thymine with phosphorothioate linkage
  modified_base 22: mod_base = OTHER; note = 2'-O-methoxyethyl modified nucleotide with phosphorothioate linkage
  modified_base 23: mod_base = OTHER; note = 2'-O-methoxyethyl 5-methylcytosine
  misc_feature 1..8: note = RNA
  misc_feature 9..18: note = DNA
  misc_feature 19..23: note = RNA
ttggcagaggtgaagcgaagtgc

SEQ ID NO: 23 - DNA, 23 bp, synthetic construct
  source 1..23: mol_type = other DNA
  modified_base 1: mod_base = OTHER; note = Nucleotide with phosphorothioate linkage
  modified_base 2: mod_base = OTHER; note = Nucleotide with phosphorothioate linkage
  modified_base 4: mod_base = OTHER; note = 2'-O-methoxyethyl modified nucleotide with phosphorothioate linkage
  modified_base 5: mod_base = OTHER; note = 2'-O-methoxyethyl 5-methylcytosine with phosphorothioate linkage
  modified_base 6: mod_base = OTHER; note = 2'-O-methoxyethyl modified nucleotide with phosphorothioate linkage
  modified_base 7: mod_base = OTHER; note = 2'-O-methoxyethyl modified nucleotide with phosphorothioate linkage
  modified_base 8: mod_base = OTHER; note = 2'-O-methoxyethyl modified nucleotide with phosphorothioate linkage
  modified_base 9: mod_base = OTHER; note = Nucleotide with phosphorothioate linkage
  modified_base 10: mod_base = OTHER; note = Nucleotide with phosphorothioate linkage
  modified_base 11: mod_base = OTHER; note = Thymine with phosphorothioate linkage
  modified_base 12: mod_base = OTHER; note = Nucleotide with phosphorothioate linkage
  modified_base 13: mod_base = OTHER; note = Nucleotide with phosphorothioate linkage
  modified_base 14: mod_base = OTHER; note = Nucleotide with phosphorothioate linkage
  modified_base 15: mod_base = OTHER; note = Nucleotide with phosphorothioate linkage
  modified_base 16: mod_base = OTHER; note = 5-methylcytosine with phosphorothioate linkage
  modified_base 17: mod_base = OTHER; note = Nucleotide with phosphorothioate linkage
  modified_base 18: mod_base = OTHER; note = Nucleotide with phosphorothioate linkage
  modified_base 19: mod_base = OTHER; note = 2'-O-methoxyethyl modified nucleotide with phosphorothioate linkage
  modified_base 20: mod_base = OTHER; note = 2'-O-methoxyethyl modified nucleotide with phosphorothioate linkage
  modified_base 21: mod_base = OTHER; note = 2'-O-methoxyethyl modified thymine with phosphorothioate linkage
  modified_base 22: mod_base = OTHER; note = 2'-O-methoxyethyl modified nucleotide with phosphorothioate linkage
  modified_base 23: mod_base = OTHER; note = 2'-O-methoxyethyl 5-methylcytosine
  misc_feature 1..8: note = RNA
  misc_feature 9..18: note = DNA
  misc_feature 19..23: note = RNA
ttggcagaggtgaagcgaagtgc

SEQ ID NO: 24 - DNA, 23 bp, synthetic construct
  source 1..23: mol_type = other DNA
  modified_base 1: mod_base = OTHER; note = Nucleotide with phosphorothioate linkage
  modified_base 2: mod_base = OTHER; note = Nucleotide with phosphorothioate linkage
  modified_base 4: mod_base = OTHER; note = 2'-O-methoxyethyl modified nucleotide with phosphorothioate linkage
  modified_base 5: mod_base = OTHER; note = 2'-O-methoxyethyl 5-methylcytosine with phosphorothioate linkage
  modified_base 6: mod_base = OTHER; note = 2'-O-methoxyethyl modified nucleotide with phosphorothioate linkage
  modified_base 7: mod_base = OTHER; note = 2'-O-methoxyethyl modified nucleotide with phosphorothioate linkage
  modified_base 8: mod_base = OTHER; note = 2'-O-methoxyethyl modified nucleotide with phosphorothioate linkage
  modified_base 9: mod_base = OTHER; note = Nucleotide with phosphorothioate linkage
  modified_base 10: mod_base = OTHER; note = Nucleotide with phosphorothioate linkage
  modified_base 11: mod_base = OTHER; note = Thymine with phosphorothioate linkage
  modified_base 12: mod_base = OTHER; note = Nucleotide with phosphorothioate linkage
  modified_base 13: mod_base = OTHER; note = Nucleotide with phosphorothioate linkage
  modified_base 14: mod_base = OTHER; note = Nucleotide with phosphorothioate linkage
  modified_base 15: mod_base = OTHER; note = Nucleotide with phosphorothioate linkage
  modified_base 16: mod_base = OTHER; note = 5-methylcytosine with phosphorothioate linkage
  modified_base 17: mod_base = OTHER; note = Nucleotide with phosphorothioate linkage
  modified_base 18: mod_base = OTHER; note = Nucleotide with phosphorothioate linkage
  modified_base 19: mod_base = OTHER; note = 2'-O-methoxyethyl modified nucleotide with phosphorothioate linkage
  modified_base 20: mod_base = OTHER; note = 2'-O-methoxyethyl modified nucleotide with phosphorothioate linkage
  modified_base 21: mod_base = OTHER; note = 2'-O-methoxyethyl modified thymine with phosphorothioate linkage
  modified_base 22: mod_base = OTHER; note = 2'-O-methoxyethyl modified nucleotide with phosphorothioate linkage
  modified_base 23: mod_base = OTHER; note = 2'-O-methoxyethyl 5-methylcytosine
  misc_feature 1..8: note = RNA
  misc_feature 9..18: note = DNA
  misc_feature 19..23: note = RNA
tgtgcagaggtgaagcgaagtgc

SEQ ID NO: 25 - DNA, 20 bp, synthetic construct
  source 1..20: mol_type = other DNA
  modified_base 1: mod_base = OTHER; note = 2'-O-cyclopropyl modified nucleotide with phosphorothioate linkage
  modified_base 2: mod_base = OTHER; note = 2'-O-methoxyethyl 5-methylcytosine with phosphorothioate linkage
  modified_base 3: mod_base = OTHER; note = 2'-O-methoxyethyl modified nucleotide with phosphorothioate linkage
  modified_base 4: mod_base = OTHER; note = 2'-O-methoxyethyl modified nucleotide with phosphorothioate linkage
  modified_base 5: mod_base = OTHER; note = 2'-O-methoxyethyl modified nucleotide with phosphorothioate linkage
  modified_base 6: mod_base = OTHER; note = Nucleotide with phosphorothioate linkage
  modified_base 7: mod_base = OTHER; note = Nucleotide with phosphorothioate linkage
  modified_base 8: mod_base = OTHER; note = Thymine with phosphorothioate linkage
  modified_base 9: mod_base = OTHER; note = Nucleotide with phosphorothioate linkage
  modified_base 10: mod_base = OTHER; note = Nucleotide with phosphorothioate linkage
  modified_base 11: mod_base = OTHER; note = Nucleotide with phosphorothioate linkage
  modified_base 12: mod_base = OTHER; note = Nucleotide with phosphorothioate linkage
  modified_base 13: mod_base = OTHER; note = 5-methylcytosine with phosphorothioate linkage
  modified_base 14: mod_base = OTHER; note = Nucleotide with phosphorothioate linkage
  modified_base 15: mod_base = OTHER; note = Nucleotide with phosphorothioate linkage
  modified_base 16: mod_base = OTHER; note = 2'-O-methoxyethyl modified nucleotide with phosphorothioate linkage
  modified_base 17: mod_base = OTHER; note = 2'-O-methoxyethyl modified nucleotide with phosphorothioate linkage
  modified_base 18: mod_base = OTHER; note = 2'-O-methoxyethyl modified thymine with phosphorothioate linkage
  modified_base 19: mod_base = OTHER; note = 2'-O-methoxyethyl modified nucleotide with phosphorothioate linkage
  modified_base 20: mod_base = OTHER; note = 2'-O-methoxyethyl 5-methylcytosine
  misc_feature 1..5: note = RNA
  misc_feature 6..15: note = DNA
  misc_feature 16..20: note = RNA
gcagaggtgaagcgaagtgc

SEQ ID NO: 26 - DNA, 20 bp, synthetic construct
  source 1..20: mol_type = other DNA
  modified_base 1: mod_base = OTHER; note = 2'-O-methoxyethyl modified nucleotide with phosphorothioate linkage
  modified_base 2: mod_base = OTHER; note = 2'-O-cyclopropyl modified nucleotide with phosphorothioate linkage
  modified_base 3: mod_base = OTHER; note = 2'-O-methoxyethyl modified nucleotide with phosphorothioate linkage
  modified_base 4: mod_base = OTHER; note = 2'-O-methoxyethyl modified nucleotide with phosphorothioate linkage
  modified_base 5: mod_base = OTHER; note = 2'-O-methoxyethyl modified nucleotide with phosphorothioate linkage
  modified_base 6: mod_base = OTHER; note = Nucleotide with phosphorothioate linkage
  modified_base 7: mod_base = OTHER; note = Nucleotide with phosphorothioate linkage
  modified_base 8: mod_base = OTHER; note = Thymine with phosphorothioate linkage
  modified_base 9: mod_base = OTHER; note = Nucleotide with phosphorothioate linkage
  modified_base 10: mod_base = OTHER; note = Nucleotide with phosphorothioate linkage
  modified_base 11: mod_base = OTHER; note = Nucleotide with phosphorothioate linkage
  modified_base 12: mod_base = OTHER; note = Nucleotide with phosphorothioate linkage
  modified_base 13: mod_base = OTHER; note = 5-methylcytosine with phosphorothioate linkage
  modified_base 14: mod_base = OTHER; note = Nucleotide with phosphorothioate linkage
  modified_base 15: mod_base = OTHER; note = Nucleotide with phosphorothioate linkage
  modified_base 16: mod_base = OTHER; note = 2'-O-methoxyethyl modified nucleotide with phosphorothioate linkage
  modified_base 17: mod_base = OTHER; note = 2'-O-methoxyethyl modified nucleotide with phosphorothioate linkage
  modified_base 18: mod_base = OTHER; note = 2'-O-methoxyethyl modified thymine with phosphorothioate linkage
  modified_base 19: mod_base = OTHER; note = 2'-O-methoxyethyl modified nucleotide with phosphorothioate linkage
  modified_base 20: mod_base = OTHER; note = 2'-O-methoxyethyl 5-methylcytosine
  misc_feature 1..5: note = RNA
  misc_feature 6..15: note = DNA
  misc_feature 16..20: note = RNA
gcagaggtgaagcgaagtgc

SEQ ID NO: 27 - DNA, 20 bp, synthetic construct
  source 1..20: mol_type = other DNA
  modified_base 1: mod_base = OTHER; note = 2'-O-methoxyethyl modified nucleotide with phosphorothioate linkage
  modified_base 2: mod_base = OTHER; note = 2'-O-methoxyethyl 5-methylcytosine with phosphorothioate linkage
  modified_base 3: mod_base = OTHER; note = 2'-O-cyclopropyl modified nucleotide with phosphorothioate linkage
  modified_base 4: mod_base = OTHER; note = 2'-O-methoxyethyl modified nucleotide with phosphorothioate linkage
  modified_base 5: mod_base = OTHER; note = 2'-O-methoxyethyl modified nucleotide with phosphorothioate linkage
  modified_base 6: mod_base = OTHER; note = Nucleotide with phosphorothioate linkage
  modified_base 7: mod_base = OTHER; note = Nucleotide with phosphorothioate linkage
  modified_base 8: mod_base = OTHER; note = Thymine with phosphorothioate linkage
  modified_base 9: mod_base = OTHER; note = Nucleotide with phosphorothioate linkage
  modified_base 10: mod_base = OTHER; note = Nucleotide with phosphorothioate linkage
  modified_base 11: mod_base = OTHER; note = Nucleotide with phosphorothioate linkage
  modified_base 12: mod_base = OTHER; note = Nucleotide with phosphorothioate linkage
  modified_base 13: mod_base = OTHER; note = 5-methylcytosine with phosphorothioate linkage
  modified_base 14: mod_base = OTHER; note = Nucleotide with phosphorothioate linkage
  modified_base 15: mod_base = OTHER; note = Nucleotide with phosphorothioate linkage
  modified_base 16: mod_base = OTHER; note = 2'-O-methoxyethyl modified nucleotide with phosphorothioate linkage
  modified_base 17: mod_base = OTHER; note = 2'-O-methoxyethyl modified nucleotide with phosphorothioate linkage
  modified_base 18: mod_base = OTHER; note = 2'-O-methoxyethyl modified thymine with phosphorothioate linkage
  modified_base 19: mod_base = OTHER; note = 2'-O-methoxyethyl modified nucleotide with phosphorothioate linkage
  modified_base 20: mod_base = OTHER; note = 2'-O-methoxyethyl 5-methylcytosine
  misc_feature 1..5: note = RNA
  misc_feature 6..15: note = DNA
  misc_feature 16..20: note = RNA
gcagaggtgaagcgaagtgc

SEQ ID NO: 28 - DNA, 20 bp, synthetic construct
  source 1..20: mol_type = other DNA
  modified_base 1: mod_base = OTHER; note = 2'-O-methoxyethyl modified nucleotide with phosphorothioate linkage
  modified_base 2: mod_base = OTHER; note = 2'-O-methoxyethyl 5-methylcytosine with phosphorothioate linkage
  modified_base 3: mod_base = OTHER; note = 2'-O-methoxyethyl modified nucleotide with phosphorothioate linkage
  modified_base 4: mod_base = OTHER; note = 2'-O-cyclopropyl modified nucleotide with phosphorothioate linkage
  modified_base 5: mod_base = OTHER; note = 2'-O-methoxyethyl modified nucleotide with phosphorothioate linkage
  modified_base 6: mod_base = OTHER; note = Nucleotide with phosphorothioate linkage
  modified_base 7: mod_base = OTHER; note = Nucleotide with phosphorothioate linkage
  modified_base 8: mod_base = OTHER; note = Thymine with phosphorothioate linkage
  modified_base 9: mod_base = OTHER; note = Nucleotide with phosphorothioate linkage
  modified_base 10: mod_base = OTHER; note = Nucleotide with phosphorothioate linkage
  modified_base 11: mod_base = OTHER; note = Nucleotide with phosphorothioate linkage
  modified_base 12: mod_base = OTHER; note = Nucleotide with phosphorothioate linkage
  modified_base 13: mod_base = OTHER; note = 5-methylcytosine with phosphorothioate linkage
  modified_base 14: mod_base = OTHER; note = Nucleotide with phosphorothioate linkage
  modified_base 15: mod_base = OTHER; note = Nucleotide with phosphorothioate linkage
  modified_base 16: mod_base = OTHER; note = 2'-O-methoxyethyl modified nucleotide with phosphorothioate linkage
  modified_base 17: mod_base = OTHER; note = 2'-O-methoxyethyl modified nucleotide with phosphorothioate linkage
  modified_base 18: mod_base = OTHER; note = 2'-O-methoxyethyl modified thymine with phosphorothioate linkage
  modified_base 19: mod_base = OTHER; note = 2'-O-methoxyethyl modified nucleotide with phosphorothioate linkage
  modified_base 20: mod_base = OTHER; note = 2'-O-methoxyethyl 5-methylcytosine
  misc_feature 1..5: note = RNA
  misc_feature 6..15: note = DNA
  misc_feature 16..20: note = RNA
gcagaggtgaagcgaagtgc

SEQ ID NO: 29 - DNA, 20 bp, synthetic construct
  source 1..20: mol_type = other DNA
  modified_base 1: mod_base = OTHER; note = 2'-O-methoxyethyl modified nucleotide with phosphorothioate linkage
  modified_base 2: mod_base = OTHER; note = 2'-O-methoxyethyl 5-methylcytosine with phosphorothioate linkage
  modified_base 3: mod_base = OTHER; note = 2'-O-methoxyethyl modified nucleotide with phosphorothioate linkage
  modified_base 4: mod_base = OTHER; note = 2'-O-methoxyethyl modified nucleotide with phosphorothioate linkage
  modified_base 5: mod_base = OTHER; note = 2'-O-cyclopropyl modified nucleotide with phosphorothioate linkage
  modified_base 6: mod_base = OTHER; note = Nucleotide with phosphorothioate linkage
  modified_base 7: mod_base = OTHER; note = Nucleotide with phosphorothioate linkage
  modified_base 8: mod_base = OTHER; note = Thymine with phosphorothioate linkage
  modified_base 9: mod_base = OTHER; note = Nucleotide with phosphorothioate linkage
  modified_base 10: mod_base = OTHER; note = Nucleotide with phosphorothioate linkage
  modified_base 11: mod_base = OTHER; note = Nucleotide with phosphorothioate linkage
  modified_base 12: mod_base = OTHER; note = Nucleotide with phosphorothioate linkage
  modified_base 13: mod_base = OTHER; note = 5-methylcytosine with phosphorothioate linkage
  modified_base 14: mod_base = OTHER; note = Nucleotide with phosphorothioate linkage
  modified_base 15: mod_base = OTHER; note = Nucleotide with phosphorothioate linkage
  modified_base 16: mod_base = OTHER; note = 2'-O-methoxyethyl modified nucleotide with phosphorothioate linkage
  modified_base 17: mod_base = OTHER; note = 2'-O-methoxyethyl modified nucleotide with phosphorothioate linkage
  modified_base 18: mod_base = OTHER; note = 2'-O-methoxyethyl modified thymine with phosphorothioate linkage
  modified_base 19: mod_base = OTHER; note = 2'-O-methoxyethyl modified nucleotide with phosphorothioate linkage
  modified_base 20: mod_base = OTHER; note = 2'-O-methoxyethyl 5-methylcytosine
  misc_feature 1..5: note = RNA
  misc_feature 6..15: note = DNA
  misc_feature 16..20: note = RNA
gcagaggtgaagcgaagtgc

SEQ ID NO: 30 - DNA, 20 bp, synthetic construct
  source 1..20: mol_type = other DNA
  modified_base 1: mod_base = OTHER; note = 2'-O-methoxyethyl modified nucleotide with phosphorothioate linkage
  modified_base 2: mod_base = OTHER; note = 2'-O-methoxyethyl 5-methylcytosine with phosphorothioate linkage
  modified_base 3: mod_base = OTHER; note = 2'-O-methoxyethyl modified nucleotide with phosphorothioate linkage
  modified_base 4: mod_base = OTHER; note = 2'-O-methoxyethyl modified nucleotide with phosphorothioate linkage
  modified_base 5: mod_base = OTHER; note = 2'-O-methoxyethyl modified nucleotide with phosphorothioate linkage
  modified_base 6: mod_base = OTHER; note = Nucleotide with phosphorothioate linkage
  modified_base 7: mod_base = OTHER; note = Nucleotide with phosphorothioate linkage
  modified_base 8: mod_base = OTHER; note = Thymine with phosphorothioate linkage
  modified_base 9: mod_base = OTHER; note = Nucleotide with phosphorothioate linkage
  modified_base 10: mod_base = OTHER; note = Nucleotide with phosphorothioate linkage
  modified_base 11: mod_base = OTHER; note = Nucleotide with phosphorothioate linkage
  modified_base 12: mod_base = OTHER; note = Nucleotide with phosphorothioate linkage
  modified_base 13: mod_base = OTHER; note = 5-methylcytosine with phosphorothioate linkage
  modified_base 14: mod_base = OTHER; note = Nucleotide with phosphorothioate linkage
  modified_base 15: mod_base = OTHER; note = Nucleotide with phosphorothioate linkage
  modified_base 16: mod_base = OTHER; note = 2'-O-cyclopropyl modified nucleotide with phosphorothioate linkage
  modified_base 17: mod_base = OTHER; note = 2'-O-methoxyethyl modified nucleotide with phosphorothioate linkage
  modified_base 18: mod_base = OTHER; note = 2'-O-methoxyethyl modified thymine with phosphorothioate linkage
  modified_base 19: mod_base = OTHER; note = 2'-O-methoxyethyl modified nucleotide with phosphorothioate linkage
  modified_base 20: mod_base = OTHER; note = 2'-O-methoxyethyl 5-methylcytosine
  misc_feature 1..5: note = RNA
  misc_feature 6..15: note = DNA
  misc_feature 16..20: note = RNA
gcagaggtgaagcgaagtgc

SEQ ID NO: 31 - DNA, 20 bp, synthetic construct
  source 1..20: mol_type = other DNA
  modified_base 1: mod_base = OTHER; note = 2'-O-methoxyethyl modified nucleotide with phosphorothioate linkage
  modified_base 2: mod_base = OTHER; note = 2'-O-methoxyethyl 5-methylcytosine with phosphorothioate linkage
  modified_base 3: mod_base = OTHER; note = 2'-O-methoxyethyl modified nucleotide with phosphorothioate linkage
  modified_base 4: mod_base = OTHER; note = 2'-O-methoxyethyl modified nucleotide with phosphorothioate linkage
  modified_base 5: mod_base = OTHER; note = 2'-O-methoxyethyl modified nucleotide with phosphorothioate linkage
  modified_base 6: mod_base = OTHER; note = Nucleotide with phosphorothioate linkage
  modified_base 7: mod_base = OTHER; note = Nucleotide with phosphorothioate linkage
  modified_base 8: mod_base = OTHER; note = Thymine with phosphorothioate linkage
  modified_base 9: mod_base = OTHER; note = Nucleotide with phosphorothioate linkage
  modified_base 10: mod_base = OTHER; note = Nucleotide with phosphorothioate linkage
  modified_base 11: mod_base = OTHER; note = Nucleotide with phosphorothioate linkage
  modified_base 12: mod_base = OTHER; note = Nucleotide with phosphorothioate linkage
  modified_base 13: mod_base = OTHER; note = 5-methylcytosine with phosphorothioate linkage
  modified_base 14: mod_base = OTHER; note = Nucleotide with phosphorothioate linkage
  modified_base 15: mod_base = OTHER; note = Nucleotide with phosphorothioate linkage
  modified_base 16: mod_base = OTHER; note = 2'-O-methoxyethyl modified nucleotide with phosphorothioate linkage
  modified_base 17: mod_base = OTHER; note = 2'-O-cyclopropyl modified nucleotide with phosphorothioate linkage
  modified_base 18: mod_base = OTHER; note = 2'-O-methoxyethyl modified thymine with phosphorothioate linkage
  modified_base 19: mod_base = OTHER; note = 2'-O-methoxyethyl modified nucleotide with phosphorothioate linkage
  modified_base 20: mod_base = OTHER; note = 2'-O-methoxyethyl 5-methylcytosine
  misc_feature 1..5: note = RNA
  misc_feature 6..15: note = DNA
  misc_feature 16..20: note = RNA
gcagaggtgaagcgaagtgc

SEQ ID NO: 32 - DNA, 20 bp, synthetic construct
  source 1..20: mol_type = other DNA
  modified_base 1: mod_base = OTHER; note = 2'-O-methoxyethyl modified nucleotide with phosphorothioate linkage
  modified_base 2: mod_base = OTHER; note = 2'-O-methoxyethyl 5-methylcytosine with phosphorothioate linkage
  modified_base 3: mod_base = OTHER; note = 2'-O-methoxyethyl modified nucleotide with phosphorothioate linkage
  modified_base 4: mod_base = OTHER; note = 2'-O-methoxyethyl modified nucleotide with phosphorothioate linkage
  modified_base 5: mod_base = OTHER; note = 2'-O-methoxyethyl modified nucleotide with phosphorothioate linkage
  modified_base 6: mod_base = OTHER; note = Nucleotide with phosphorothioate linkage
  modified_base 7: mod_base = OTHER; note = Nucleotide with phosphorothioate linkage
  modified_base 8: mod_base = OTHER; note = Thymine with phosphorothioate linkage
  modified_base 9: mod_base = OTHER; note = Nucleotide with phosphorothioate linkage
  modified_base 10: mod_base = OTHER; note = Nucleotide with phosphorothioate linkage
  modified_base 11: mod_base = OTHER; note = Nucleotide with phosphorothioate linkage
  modified_base 12: mod_base = OTHER; note = Nucleotide with phosphorothioate linkage
  modified_base 13: mod_base = OTHER; note = 5-methylcytosine with phosphorothioate linkage
  modified_base 14: mod_base = OTHER; note = Nucleotide with phosphorothioate linkage
  modified_base 15: mod_base = OTHER; note = Nucleotide with phosphorothioate linkage
  modified_base 16: mod_base = OTHER; note = 2'-O-methoxyethyl modified nucleotide with phosphorothioate linkage
  modified_base 17: mod_base = OTHER; note = 2'-O-methoxyethyl modified nucleotide with phosphorothioate linkage
  modified_base 18: mod_base = OTHER; note = 2'-O-cyclopropyl modified nucleotide with phosphorothioate linkage
  modified_base 19: mod_base = OTHER; note = 2'-O-methoxyethyl modified nucleotide with phosphorothioate linkage
  modified_base 20: mod_base = OTHER; note = 2'-O-methoxyethyl 5-methylcytosine
  misc_feature 1..5: note = RNA
  misc_feature 6..15: note = DNA
  misc_feature 16..20: note = RNA
gcagaggtgaagcgaagtgc

SEQ ID NO: 33 - DNA, 20 bp, synthetic construct
  source 1..20: mol_type = other DNA
  modified_base 1: mod_base = OTHER; note = 2'-O-methoxyethyl modified nucleotide with phosphorothioate linkage
  modified_base 2: mod_base = OTHER; note = 2'-O-methoxyethyl 5-methylcytosine with phosphorothioate linkage
  modified_base 3: mod_base = OTHER; note = 2'-O-methoxyethyl modified nucleotide with phosphorothioate linkage
  modified_base 4: mod_base = OTHER; note = 2'-O-methoxyethyl modified nucleotide with phosphorothioate linkage
  modified_base 5: mod_base = OTHER; note = 2'-O-methoxyethyl modified nucleotide with phosphorothioate linkage
  modified_base 6: mod_base = OTHER; note = Nucleotide with phosphorothioate linkage
  modified_base 7: mod_base = OTHER; note = Nucleotide with phosphorothioate linkage
  modified_base 8: mod_base = OTHER; note = Thymine with phosphorothioate linkage
  modified_base 9: mod_base = OTHER; note = Nucleotide with phosphorothioate linkage
  modified_base 10: mod_base = OTHER; note = Nucleotide with phosphorothioate linkage
  modified_base 11: mod_base = OTHER; note = Nucleotide with phosphorothioate linkage
  modified_base 12: mod_base = OTHER; note = Nucleotide with phosphorothioate linkage
  modified_base 13: mod_base = OTHER; note = 5-methylcytosine with phosphorothioate linkage
  modified_base 14: mod_base = OTHER; note = Nucleotide with phosphorothioate linkage
  modified_base 15: mod_base = OTHER; note = Nucleotide with phosphorothioate linkage
  modified_base 16: mod_base = OTHER; note = 2'-O-methoxyethyl modified nucleotide with phosphorothioate linkage
  modified_base 17: mod_base = OTHER; note = 2'-O-methoxyethyl modified nucleotide with phosphorothioate linkage
  modified_base 18: mod_base = OTHER; note = 2'-O-methoxyethyl modified thymine with phosphorothioate linkage
  modified_base 19: mod_base = OTHER; note = 2'-O-cyclopropyl modified nucleotide with phosphorothioate linkage
  modified_base 20: mod_base = OTHER; note = 2'-O-methoxyethyl 5-methylcytosine
  misc_feature 1..5: note = RNA
  misc_feature 6..15: note = DNA
  misc_feature 16..20: note = RNA
gcagaggtgaagcgaagtgc

SEQ ID NO: 34 - DNA, 20 bp, synthetic construct
  source 1..20: mol_type = other DNA
  modified_base 1: mod_base = OTHER; note = 2'-O-methoxyethyl modified nucleotide with phosphorothioate linkage
  modified_base 2: mod_base = OTHER; note = 2'-O-methoxyethyl 5-methylcytosine with phosphorothioate linkage
  modified_base 3: mod_base = OTHER; note = 2'-O-methoxyethyl modified nucleotide with phosphorothioate linkage
  modified_base 4: mod_base = OTHER; note = 2'-O-methoxyethyl modified nucleotide with phosphorothioate linkage
  modified_base 5: mod_base = OTHER; note = 2'-O-methoxyethyl modified nucleotide with phosphorothioate linkage
  modified_base 6: mod_base = OTHER; note = Nucleotide with phosphorothioate linkage
  modified_base 7: mod_base = OTHER; note = Nucleotide with phosphorothioate linkage
  modified_base 8: mod_base = OTHER; note = Thymine with phosphorothioate linkage
  modified_base 9: mod_base = OTHER; note = Nucleotide with phosphorothioate linkage
  modified_base 10: mod_base = OTHER; note = Nucleotide with phosphorothioate linkage
  modified_base 11: mod_base = OTHER; note = Nucleotide with phosphorothioate linkage
  modified_base 12: mod_base = OTHER; note = Nucleotide with phosphorothioate linkage
  modified_base 13: mod_base = OTHER; note = 5-methylcytosine with phosphorothioate linkage
  modified_base 14: mod_base = OTHER; note = Nucleotide with phosphorothioate linkage
  modified_base 15: mod_base = OTHER; note = Nucleotide with phosphorothioate linkage
  modified_base 16: mod_base = OTHER; note = 2'-O-methoxyethyl modified nucleotide with phosphorothioate linkage
  modified_base 17: mod_base = OTHER; note = 2'-O-methoxyethyl modified nucleotide with phosphorothioate linkage
  modified_base 18: mod_base = OTHER; note = 2'-O-methoxyethyl modified thymine with phosphorothioate linkage
  modified_base 19: mod_base = OTHER; note = 2'-O-methoxyethyl modified nucleotide with phosphorothioate linkage
  modified_base 20: mod_base = OTHER; note = 2'-O-cyclopropyl modified nucleotide
  misc_feature 1..5: note = RNA
  misc_feature 6..15: note = DNA
  misc_feature 16..20: note = RNA
gcagaggtgaagcgaagtgc

SEQ ID NO: 35 - DNA, 20 bp, synthetic construct
  source 1..20: mol_type = other DNA
  modified_base 1: mod_base = OTHER; note = 2'-O-methoxyethyl modified nucleotide with phosphorothioate linkage
  modified_base 2: mod_base = OTHER; note = 2'-O-methoxyethyl 5-methylcytosine with phosphorothioate linkage
  modified_base 3: mod_base = OTHER; note = 2'-O-methoxyethyl modified nucleotide with phosphorothioate linkage
  modified_base 4: mod_base = OTHER; note = 2'-O-methoxyethyl modified nucleotide with phosphorothioate linkage
  modified_base 5: mod_base = OTHER; note = 2'-O-methoxyethyl modified nucleotide with phosphorothioate linkage
  modified_base 6: mod_base = OTHER; note = Nucleotide with phosphorothioate linkage
  modified_base 7: mod_base = OTHER; note = Nucleotide with phosphorothioate linkage
  modified_base 8: mod_base = OTHER; note = Thymine with phosphorothioate linkage
  modified_base 9: mod_base = OTHER; note = Nucleotide with phosphorothioate linkage
  modified_base 10: mod_base = OTHER; note = Nucleotide with phosphorothioate linkage
  modified_base 11: mod_base = OTHER; note = Nucleotide with phosphorothioate linkage
  modified_base 12: mod_base = OTHER; note = Nucleotide with phosphorothioate linkage
  modified_base 13: mod_base = OTHER; note = 5-methylcytosine with phosphorothioate linkage
  modified_base 14: mod_base = OTHER; note = Nucleotide with phosphorothioate linkage
  modified_base 15: mod_base = OTHER; note = Nucleotide with phosphorothioate linkage
  modified_base 16: mod_base = OTHER; note = 2'-O-methoxyethyl modified nucleotide with phosphorothioate linkage
  modified_base 17: mod_base = OTHER; note = 2'-O-methoxyethyl modified nucleotide with phosphorothioate linkage
  modified_base 18: mod_base = OTHER; note = 2'-O-methoxyethyl modified nucleotide with phosphorothioate linkage
  modified_base 19: mod_base = OTHER; note = 2'-O-methoxyethyl modified nucleotide with phosphorothioate linkage
  modified_base 20: mod_base = OTHER; note = 2'-O-methoxyethyl 5-methylcytosine
  misc_feature 1..5: note = RNA
  misc_feature 6..15: note = DNA
  misc_feature 16..20: note = RNA
gcagaggtgaagcgaagtgc

SEQ ID NO: 36 - DNA, 21 bp, synthetic construct
  source 1..21: mol_type = other DNA
  modified_base 2: mod_base = OTHER; note = 2'-O-methoxyethyl modified nucleotide with phosphorothioate linkage
  modified_base 3: mod_base = OTHER; note = 2'-O-methoxyethyl 5-methylcytosine with phosphorothioate linkage
  modified_base 4: mod_base = OTHER; note = 2'-O-methoxyethyl modified nucleotide with phosphorothioate linkage
  modified_base 5: mod_base = OTHER; note = 2'-O-methoxyethyl modified nucleotide with phosphorothioate linkage
  modified_base 6: mod_base = OTHER; note = 2'-O-methoxyethyl modified nucleotide with phosphorothioate linkage
  modified_base 7: mod_base = OTHER; note = Nucleotide with phosphorothioate linkage
  modified_base 8: mod_base = OTHER; note = Nucleotide with phosphorothioate linkage
  modified_base 9: mod_base = OTHER; note = Thymine with phosphorothioate linkage
  modified_base 10: mod_base = OTHER; note = Nucleotide with phosphorothioate linkage
  modified_base 11: mod_base = OTHER; note = Nucleotide with phosphorothioate linkage
  modified_base 12: mod_base = OTHER; note = Nucleotide with phosphorothioate linkage
  modified_base 13: mod_base = OTHER; note = Nucleotide with phosphorothioate linkage
  modified_base 14: mod_base = OTHER; note = 5-methylcytosine with phosphorothioate linkage
  modified_base 15: mod_base = OTHER; note = Nucleotide with phosphorothioate linkage
  modified_base 16: mod_base = OTHER; note = Nucleotide with phosphorothioate linkage
  modified_base 17: mod_base = OTHER; note = 2'-O-methoxyethyl modified nucleotide with phosphorothioate linkage
  modified_base 18: mod_base = OTHER; note = 2'-O-methoxyethyl modified nucleotide with phosphorothioate linkage
  modified_base 19: mod_base = OTHER; note = 2'-O-methoxyethyl modified thymine with phosphorothioate linkage
  modified_base 20: mod_base = OTHER; note = 2'-O-methoxyethyl modified nucleotide with phosphorothioate linkage
  modified_base 21: mod_base = OTHER; note = 2'-O-methoxyethyl 5-methylcytosine
  misc_feature 1..6: note = RNA
  misc_feature 7..16: note = DNA
  misc_feature 17..21: note = RNA
tgcagaggtgaagcgaagtgc

SEQ ID NO: 37 - DNA, 22 bp, synthetic construct
  source 1..22: mol_type = other DNA
  modified_base 1: mod_base = OTHER; note = Nucleotide with phosphorothioate linkage
  modified_base 3: mod_base = OTHER; note = 2'-O-methoxyethyl modified nucleotide with phosphorothioate linkage
  modified_base 4: mod_base = OTHER; note = 2'-O-methoxyethyl 5-methylcytosine with phosphorothioate linkage
  modified_base 5: mod_base = OTHER; note = 2'-O-methoxyethyl modified nucleotide with phosphorothioate linkage
  modified_base 6: mod_base = OTHER; note = 2'-O-methoxyethyl modified nucleotide with phosphorothioate linkage
  modified_base 7: mod_base = OTHER; note = 2'-O-methoxyethyl modified nucleotide with phosphorothioate linkage
  modified_base 8: mod_base = OTHER; note = Nucleotide with phosphorothioate linkage
  modified_base 9: mod_base = OTHER; note = Nucleotide with phosphorothioate linkage
  modified_base 10: mod_base = OTHER; note = Thymine with phosphorothioate linkage
  modified_base 11: mod_base = OTHER; note = Nucleotide with phosphorothioate linkage
  modified_base 12: mod_base = OTHER; note = Nucleotide with phosphorothioate linkage
  modified_base 13: mod_base = OTHER; note = Nucleotide with phosphorothioate linkage
  modified_base 14: mod_base = OTHER; note = Nucleotide with phosphorothioate linkage
  modified_base 15: mod_base = OTHER; note = 5-methylcytosine with phosphorothioate linkage
  modified_base 16: mod_base = OTHER; note = Nucleotide with phosphorothioate linkage
  modified_base 17: mod_base = OTHER; note = Nucleotide with phosphorothioate linkage
  modified_base 18: mod_base = OTHER; note = 2'-O-methoxyethyl modified nucleotide with phosphorothioate linkage
  modified_base 19: mod_base = OTHER; note = 2'-O-methoxyethyl modified nucleotide with phosphorothioate linkage
  modified_base 20: mod_base = OTHER; note = 2'-O-methoxyethyl modified thymine with phosphorothioate linkage
  modified_base 21: mod_base = OTHER; note = 2'-O-methoxyethyl modified nucleotide with phosphorothioate linkage
  modified_base 22: mod_base = OTHER; note = 2'-O-methoxyethyl 5-methylcytosine
  misc_feature 1..7: note = RNA
  misc_feature 8..17: note = DNA
  misc_feature 18..22: note = RNA
ttgcagaggtgaagcgaagtgc

SEQ ID NO: 38 - DNA, 23 bp, synthetic construct
  source 1..23: mol_type = other DNA
  modified_base 1: mod_base = OTHER; note = Nucleotide with phosphorothioate linkage
  modified_base 2: mod_base = OTHER; note = Nucleotide with phosphorothioate linkage
  modified_base 4: mod_base = OTHER; note = 2'-O-methoxyethyl modified nucleotide with phosphorothioate linkage
  modified_base 5: mod_base = OTHER; note = 2'-O-methoxyethyl 5-methylcytosine with phosphorothioate linkage
  modified_base 6: mod_base = OTHER; note = 2'-O-methoxyethyl modified nucleotide with phosphorothioate linkage
  modified_base 7: mod_base = OTHER; note = 2'-O-methoxyethyl modified nucleotide with phosphorothioate linkage
  modified_base 8: mod_base = OTHER; note = 2'-O-methoxyethyl modified nucleotide with phosphorothioate linkage
  modified_base 9: mod_base = OTHER; note = Nucleotide with phosphorothioate linkage
  modified_base 10: mod_base = OTHER; note = Nucleotide with phosphorothioate linkage
  modified_base 11: mod_base = OTHER; note = Thymine with phosphorothioate linkage
  modified_base 12: mod_base = OTHER; note = Nucleotide with phosphorothioate linkage
  modified_base 13: mod_base = OTHER; note = Nucleotide with phosphorothioate linkage
  modified_base 14: mod_base = OTHER; note = Nucleotide with phosphorothioate linkage
  modified_base 15: mod_base = OTHER; note = Nucleotide with phosphorothioate linkage
  modified_base 16: mod_base = OTHER; note = 5-methylcytosine with phosphorothioate linkage
  modified_base 17: mod_base = OTHER; note = Nucleotide with phosphorothioate linkage
  modified_base 18: mod_base = OTHER; note = Nucleotide with phosphorothioate linkage
  modified_base 19: mod_base = OTHER; note = 2'-O-methoxyethyl modified nucleotide with phosphorothioate linkage
  modified_base 20: mod_base = OTHER; note = 2'-O-methoxyethyl modified nucleotide with phosphorothioate linkage
  modified_base 21: mod_base = OTHER; note = 2'-O-methoxyethyl modified thymine with phosphorothioate linkage
  modified_base 22: mod_base = OTHER; note = 2'-O-methoxyethyl modified nucleotide with phosphorothioate linkage
  modified_base 23: mod_base = OTHER; note = 2'-O-methoxyethyl 5-methylcytosine
  misc_feature 1..8: note = RNA
  misc_feature 9..18: note = DNA
  misc_feature 19..23: note = RNA
tttgcagaggtgaagcgaagtgc

SEQ ID NO: 39 - DNA, 22 bp, synthetic construct
  source 1..22: mol_type = other DNA
  modified_base 1: mod_base = OTHER; note = Nucleotide with phosphorothioate linkage
  modified_base 3: mod_base = OTHER; note = 2'-O-methoxyethyl modified nucleotide with phosphorothioate linkage
  modified_base 4: mod_base = OTHER; note = 2'-O-methoxyethyl 5-methylcytosine with phosphorothioate linkage
  modified_base 5: mod_base = OTHER; note = 2'-O-methoxyethyl modified nucleotide with phosphorothioate linkage
  modified_base 6: mod_base = OTHER; note = 2'-O-methoxyethyl modified nucleotide with phosphorothioate linkage
  modified_base 7: mod_base = OTHER; note = 2'-O-methoxyethyl modified nucleotide with phosphorothioate linkage
  modified_base 8: mod_base = OTHER; note = Nucleotide with phosphorothioate linkage
  modified_base 9: mod_base = OTHER; note = Nucleotide with phosphorothioate linkage
  modified_base 10: mod_base = OTHER; note = Thymine with phosphorothioate linkage
  modified_base 11: mod_base = OTHER; note = Nucleotide with phosphorothioate linkage
  modified_base 12: mod_base = OTHER; note = Nucleotide with phosphorothioate linkage
  modified_base 13: mod_base = OTHER; note = Nucleotide with phosphorothioate linkage
  modified_base 14: mod_base = OTHER; note = Nucleotide with phosphorothioate linkage
  modified_base 15: mod_base = OTHER; note = 5-methylcytosine with phosphorothioate linkage
  modified_base 16: mod_base = OTHER; note = Nucleotide with phosphorothioate linkage
  modified_base 17: mod_base = OTHER; note = Nucleotide with phosphorothioate linkage
  modified_base 18: mod_base = OTHER; note = 2'-O-methoxyethyl modified nucleotide with phosphorothioate linkage
  modified_base 19: mod_base = OTHER; note = 2'-O-methoxyethyl modified nucleotide with phosphorothioate linkage
  modified_base 20: mod_base = OTHER; note = 2'-O-methoxyethyl modified thymine with phosphorothioate linkage
  modified_base 21: mod_base = OTHER; note = 2'-O-methoxyethyl modified nucleotide with phosphorothioate linkage
  modified_base 22: mod_base = OTHER; note = 2'-O-methoxyethyl 5-methylcytosine
  misc_feature 1..7: note = RNA
  misc_feature 8..17: note = DNA
  misc_feature 18..22: note = RNA
tggcagaggtgaagcgaagtgc

SEQ ID NO: 40 - DNA, 23 bp, synthetic construct
  source 1..23: mol_type = other DNA
  modified_base 4: mod_base = OTHER; note = 2'-O-methoxyethyl modified nucleotide with phosphorothioate linkage
  modified_base 5: mod_base = OTHER; note = 2'-O-methoxyethyl 5-methylcytosine with phosphorothioate linkage
  modified_base 6: mod_base = OTHER; note = 2'-O-methoxyethyl modified nucleotide with phosphorothioate linkage
  modified_base 7: mod_base = OTHER; note = 2'-O-methoxyethyl modified nucleotide with phosphorothioate linkage
  modified_base 8: mod_base = OTHER; note = 2'-O-methoxyethyl modified nucleotide with phosphorothioate linkage
  modified_base 9: mod_base = OTHER; note = Nucleotide with phosphorothioate linkage
  modified_base 10: mod_base = OTHER; note = Nucleotide with phosphorothioate linkage
  modified_base 11: mod_base = OTHER; note = Thymine with phosphorothioate linkage
  modified_base 12: mod_base = OTHER; note = Nucleotide with phosphorothioate linkage
  modified_base 13: mod_base = OTHER; note = Nucleotide with phosphorothioate linkage
  modified_base 14: mod_base = OTHER; note = Nucleotide with phosphorothioate linkage
  modified_base 15: mod_base = OTHER; note = Nucleotide with phosphorothioate linkage
  modified_base 16: mod_base = OTHER; note = 5-methylcytosine with phosphorothioate linkage
  modified_base 17: mod_base = OTHER; note = Nucleotide with phosphorothioate linkage
  modified_base 18: mod_base = OTHER; note = Nucleotide with phosphorothioate linkage
  modified_base 19: mod_base = OTHER; note = 2'-O-methoxyethyl modified nucleotide with phosphorothioate linkage
  modified_base 20: mod_base = OTHER; note = 2'-O-methoxyethyl modified nucleotide with phosphorothioate linkage
  modified_base 21: mod_base = OTHER; note = 2'-O-methoxyethyl modified thymine with phosphorothioate linkage
  modified_base 22: mod_base = OTHER; note = 2'-O-methoxyethyl modified nucleotide with phosphorothioate linkage
  modified_base 23: mod_base = OTHER; note = 2'-O-methoxyethyl 5-methylcytosine
  misc_feature 1..8: note = RNA
  misc_feature 9..18: note = DNA
  misc_feature 19..23: note = RNA
ttggcagaggtgaagcgaagtgc

SEQ ID NO: 41 - DNA, 24 bp, synthetic construct
  source 1..24: mol_type = other DNA
  modified_base 5: mod_base = OTHER; note = 2'-O-methoxyethyl modified nucleotide with phosphorothioate linkage
  modified_base 6: mod_base = OTHER; note = 2'-O-methoxyethyl 5-methylcytosine with phosphorothioate linkage
  modified_base 7: mod_base = OTHER; note = 2'-O-methoxyethyl modified nucleotide with phosphorothioate linkage
  modified_base 8: mod_base = OTHER; note = 2'-O-methoxyethyl modified nucleotide with phosphorothioate linkage
  modified_base 9: mod_base = OTHER; note = 2'-O-methoxyethyl modified nucleotide with phosphorothioate linkage
  modified_base 10: mod_base = OTHER; note = Nucleotide with phosphorothioate linkage
  modified_base 11: mod_base = OTHER; note = Nucleotide with phosphorothioate linkage
  modified_base 12: mod_base = OTHER; note = Thymine with phosphorothioate linkage
  modified_base 13: mod_base = OTHER; note = Nucleotide with phosphorothioate linkage
  modified_base 14: mod_base = OTHER; note = Nucleotide with phosphorothioate linkage
  modified_base 15: mod_base = OTHER; note = Nucleotide with phosphorothioate linkage
  modified_base 16: mod_base = OTHER; note = Nucleotide with phosphorothioate linkage
  modified_base 17: mod_base = OTHER; note = 5-methylcytosine with phosphorothioate linkage
  modified_base 18: mod_base = OTHER; note = Nucleotide with phosphorothioate linkage
  modified_base 19: mod_base = OTHER; note = Nucleotide with phosphorothioate linkage
  modified_base 20: mod_base = OTHER; note = 2'-O-methoxyethyl modified nucleotide with phosphorothioate linkage
  modified_base 21: mod_base = OTHER; note = 2'-O-methoxyethyl modified nucleotide with phosphorothioate linkage
  modified_base 22: mod_base = OTHER; note = 2'-O-methoxyethyl modified thymine with phosphorothioate linkage
  modified_base 23: mod_base = OTHER; note = 2'-O-methoxyethyl modified nucleotide with phosphorothioate linkage
  modified_base 24: mod_base = OTHER; note = 2'-O-methoxyethyl 5-methylcytosine
  misc_feature 1..9: note = RNA
  misc_feature 10..19: note = DNA
  misc_feature 20..24: note = RNA
ttgtgcagaggtgaagcgaagtgc

SEQ ID NO: 42 - DNA, 20 bp, synthetic construct
  source 1..20: mol_type = other DNA
  modified_base 1: mod_base = OTHER; note = 2'-O-methyl-3'-xylo modified nucleotide with phosphorothioate linkage
  modified_base 2: mod_base = OTHER; note = 2'-O-methoxyethyl 5-methylcytosine with phosphorothioate linkage
  modified_base 3: mod_base = OTHER; note = 2'-O-methoxyethyl modified nucleotide with phosphorothioate linkage
  modified_base 4: mod_base = OTHER; note = 2'-O-methoxyethyl modified nucleotide with phosphorothioate linkage
  modified_base 5: mod_base = OTHER; note = 2'-O-methoxyethyl modified nucleotide with phosphorothioate linkage
  modified_base 6: mod_base = OTHER; note = Nucleotide with phosphorothioate linkage
  modified_base 7: mod_base = OTHER; note = Nucleotide with phosphorothioate linkage
  modified_base 8: mod_base = OTHER; note = Thymine with phosphorothioate linkage
  modified_base 9: mod_base = OTHER; note = Nucleotide with phosphorothioate linkage
  modified_base 10: mod_base = OTHER; note = Nucleotide with phosphorothioate linkage
  modified_base 11: mod_base = OTHER; note = Nucleotide with phosphorothioate linkage
  modified_base 12: mod_base = OTHER; note = Nucleotide with phosphorothioate linkage
  modified_base 13: mod_base = OTHER; note = 5-methylcytosine with phosphorothioate linkage
  modified_base 14: mod_base = OTHER; note = Nucleotide with phosphorothioate linkage
  modified_base 15: mod_base = OTHER; note = Nucleotide with phosphorothioate linkage
  modified_base 16: mod_base = OTHER; note = 2'-O-methoxyethyl modified nucleotide with phosphorothioate linkage
  modified_base 17: mod_base = OTHER; note = 2'-O-methoxyethyl modified nucleotide with phosphorothioate linkage
  modified_base 18: mod_base = OTHER; note = 2'-O-methoxyethyl modified thymine with phosphorothioate linkage
  modified_base 19: mod_base = OTHER; note = 2'-O-methoxyethyl modified nucleotide with phosphorothioate linkage
  modified_base 20: mod_base = OTHER; note = 2'-O-methoxyethyl 5-methylcytosine
  misc_feature 1..5: note = RNA
  misc_feature 6..15: note = DNA
  misc_feature 16..20: note = RNA
gcagaggtgaagcgaagtgc

SEQ ID NO: 43 - DNA, 20 bp, synthetic construct
  source 1..20: mol_type = other DNA
  modified_base 1: mod_base = OTHER; note = 2'-O-methoxyethyl modified nucleotide with phosphorothioate linkage
  modified_base 2: mod_base = OTHER; note = 2'-O-methoxyethyl 5-methylcytosine with phosphorothioate linkage
  modified_base 3: mod_base = OTHER; note = 2'-O-methoxyethyl modified nucleotide with phosphorothioate linkage
  modified_base 4: mod_base = OTHER; note = 2'-O-methyl-3'-xylo modified nucleotide with phosphorothioate linkage
  modified_base 5: mod_base = OTHER; note = 2'-O-methoxyethyl modified nucleotide with phosphorothioate linkage
  modified_base 6: mod_base = OTHER; note = Nucleotide with phosphorothioate linkage
  modified_base 7: mod_base = OTHER; note = Nucleotide with phosphorothioate linkage
  modified_base 8: mod_base = OTHER; note = Thymine with phosphorothioate linkage
  modified_base 9: mod_base = OTHER; note = Nucleotide with phosphorothioate linkage
  modified_base 10: mod_base = OTHER; note = Nucleotide with phosphorothioate linkage
  modified_base 11: mod_base = OTHER; note = Nucleotide with phosphorothioate linkage
  modified_base 12: mod_base = OTHER; note = Nucleotide with phosphorothioate linkage
  modified_base 13: mod_base = OTHER; note = 5-methylcytosine with phosphorothioate linkage
  modified_base 14: mod_base = OTHER; note = Nucleotide with phosphorothioate linkage
  modified_base 15: mod_base = OTHER; note = Nucleotide with phosphorothioate linkage
  modified_base 16: mod_base = OTHER; note = 2'-O-methoxyethyl modified nucleotide with phosphorothioate linkage
  modified_base 17: mod_base = OTHER; note = 2'-O-methoxyethyl modified nucleotide with phosphorothioate linkage
  modified_base 18: mod_base = OTHER; note = 2'-O-methoxyethyl modified thymine with phosphorothioate linkage
  modified_base 19: mod_base = OTHER; note = 2'-O-methoxyethyl modified nucleotide with phosphorothioate linkage
  modified_base 20: mod_base = OTHER; note = 2'-O-methoxyethyl 5-methylcytosine
  misc_feature 1..5: note = RNA
  misc_feature 6..15: note = DNA
  misc_feature 16..20: note = RNA
gcagaggtgaagcgaagtgc

SEQ ID NO: 44 - DNA, 20 bp, synthetic construct
  source 1..20: mol_type = other DNA
  modified_base 1: mod_base = OTHER; note = 2'-O-methoxyethyl modified nucleotide with phosphorothioate linkage
  modified_base 2: mod_base = OTHER; note = 2'-O-methoxyethyl 5-methylcytosine with phosphorothioate linkage
  modified_base 3: mod_base = OTHER; note = 2'-O-methoxyethyl modified nucleotide with phosphorothioate linkage
  modified_base 4: mod_base = OTHER; note = 2'-O-methoxyethyl modified nucleotide with phosphorothioate linkage
  modified_base 5: mod_base = OTHER; note = 2'-O-methoxyethyl modified nucleotide with phosphorothioate linkage
  modified_base 6: mod_base = OTHER; note = Nucleotide with phosphorothioate linkage
  modified_base 7: mod_base = OTHER; note = Nucleotide with phosphorothioate linkage
  modified_base 8: mod_base = OTHER; note = Thymine with phosphorothioate linkage
  modified_base 9: mod_base = OTHER; note = Nucleotide with phosphorothioate linkage
  modified_base 10: mod_base = OTHER; note = Nucleotide with phosphorothioate linkage
  modified_base 11: mod_base = OTHER; note = Nucleotide with phosphorothioate linkage
  modified_base 12: mod_base = OTHER; note = Nucleotide with phosphorothioate linkage
  modified_base 13: mod_base = OTHER; note = 5-methylcytosine with phosphorothioate linkage
  modified_base 14: mod_base = OTHER; note = Nucleotide with phosphorothioate linkage
  modified_base 15: mod_base = OTHER; note = Nucleotide with phosphorothioate linkage
  modified_base 16: mod_base = OTHER; note = 2'-O-methoxyethyl modified nucleotide with phosphorothioate linkage
  modified_base 17: mod_base = OTHER; note = 2'-O-methyl-3'-xylo modified nucleotide with phosphorothioate linkage
  modified_base 18: mod_base = OTHER; note = 2'-O-methoxyethyl modified thymine with phosphorothioate linkage
  modified_base 19: mod_base = OTHER; note = 2'-O-methoxyethyl modified nucleotide with phosphorothioate linkage
  modified_base 20: mod_base = OTHER; note = 2'-O-methoxyethyl 5-methylcytosine
  misc_feature 1..5: note = RNA
  misc_feature 6..15: note = DNA
  misc_feature 16..20: note = RNA
gcagaggtgaagcgaagtgc

SEQ ID NO: 45 - DNA, 20 bp, synthetic construct
  source 1..20: mol_type = other DNA
  modified_base 1: mod_base = OTHER; note = 2'-O-methoxyethyl modified nucleotide with phosphorothioate linkage
  modified_base 2: mod_base = OTHER; note = 2'-O-methoxyethyl 5-methylcytosine with phosphorothioate linkage
  modified_base 3: mod_base = OTHER; note = 2'-O-methoxyethyl modified nucleotide with phosphorothioate linkage
  modified_base 4: mod_base = OTHER; note = 2'-O-methoxyethyl modified nucleotide with phosphorothioate linkage
  modified_base 5: mod_base = OTHER; note = 2'-O-methoxyethyl modified nucleotide with phosphorothioate linkage
  modified_base 6: mod_base = OTHER; note = Nucleotide with phosphorothioate linkage
  modified_base 7: mod_base = OTHER; note = Nucleotide with phosphorothioate linkage
  modified_base 8: mod_base = OTHER; note = Thymine with phosphorothioate linkage
  modified_base 9: mod_base = OTHER; note = Nucleotide with phosphorothioate linkage
  modified_base 10: mod_base = OTHER; note = Nucleotide with phosphorothioate linkage
  modified_base 11: mod_base = OTHER; note = Nucleotide with phosphorothioate linkage
  modified_base 12: mod_base = OTHER; note = Nucleotide with phosphorothioate linkage
  modified_base 13: mod_base = OTHER; note = 5-methylcytosine with phosphorothioate linkage
  modified_base 14: mod_base = OTHER; note = Nucleotide with phosphorothioate linkage
  modified_base 15: mod_base = OTHER; note = Nucleotide with phosphorothioate linkage
  modified_base 16: mod_base = OTHER; note = 2'-O-methoxyethyl modified nucleotide with phosphorothioate linkage
  modified_base 17: mod_base = OTHER; note = 2'-O-methoxyethyl modified nucleotide with phosphorothioate linkage
  modified_base 18: mod_base = OTHER; note = 2'-O-methoxyethyl modified thymine with phosphorothioate linkage
  modified_base 19: mod_base = OTHER; note = 2'-O-methyl-3'-xylo modified nucleotide with phosphorothioate linkage
  modified_base 20: mod_base = OTHER; note = 2'-O-methoxyethyl 5-methylcytosine
  misc_feature 1..5: note = RNA
  misc_feature 6..15: note = DNA
  misc_feature 16..20: note = RNA
gcagaggtgaagcgaagtgc

SEQ ID NO: 46 - DNA, 26 bp, synthetic construct
  source 1..26: mol_type = other DNA
  modified_base 7: mod_base = OTHER; note = 2'-O-methoxyethyl modified nucleotide with phosphorothioate linkage
  modified_base 8: mod_base = OTHER; note = 2'-O-methoxyethyl 5-methylcytosine with phosphorothioate linkage
  modified_base 9: mod_base = OTHER; note = 2'-O-methoxyethyl modified nucleotide with phosphorothioate linkage
  modified_base 10: mod_base = OTHER; note = 2'-O-methoxyethyl modified nucleotide with phosphorothioate linkage
  modified_base 11: mod_base = OTHER; note = 2'-O-methoxyethyl modified nucleotide with phosphorothioate linkage
  modified_base 12: mod_base = OTHER; note = Nucleotide with phosphorothioate linkage
  modified_base 13: mod_base = OTHER; note = Nucleotide with phosphorothioate linkage
  modified_base 14: mod_base = OTHER; note = Thymine with phosphorothioate linkage
  modified_base 15: mod_base = OTHER; note = Nucleotide with phosphorothioate linkage
  modified_base 16: mod_base = OTHER; note = Nucleotide with phosphorothioate linkage
  modified_base 17: mod_base = OTHER; note = Nucleotide with phosphorothioate linkage
  modified_base 18: mod_base = OTHER; note = Nucleotide with phosphorothioate linkage
  modified_base 19: mod_base = OTHER; note = 5-methylcytosine with phosphorothioate linkage
  modified_base 20: mod_base = OTHER; note = Nucleotide with phosphorothioate linkage
  modified_base 21: mod_base = OTHER; note = Nucleotide with phosphorothioate linkage
  modified_base 22: mod_base = OTHER; note = 2'-O-methoxyethyl modified nucleotide with phosphorothioate linkage
  modified_base 23: mod_base = OTHER; note = 2'-O-methoxyethyl modified nucleotide with phosphorothioate linkage
  modified_base 24: mod_base = OTHER; note = 2'-O-methoxyethyl modified thymine with phosphorothioate linkage
  modified_base 25: mod_base = OTHER; note = 2'-O-methoxyethyl modified nucleotide with phosphorothioate linkage
  modified_base 26: mod_base = OTHER; note = 2'-O-methoxyethyl 5-methylcytosine
  misc_feature 1..11: note = RNA
  misc_feature 12..21: note = DNA
  misc_feature 22..26: note = RNA
tgttgtgcagaggtgaagcgaagtgc

SEQ ID NO: 47 - DNA, 24 bp, synthetic construct
  source 1..24: mol_type = other DNA
  modified_base 5: mod_base = OTHER; note = 2'-O-methoxyethyl modified nucleotide with phosphorothioate linkage
  modified_base 6: mod_base = OTHER; note = 2'-O-methoxyethyl 5-methylcytosine with phosphorothioate linkage
  modified_base 7: mod_base = OTHER; note = 2'-O-methoxyethyl modified nucleotide with phosphorothioate linkage
  modified_base 8: mod_base = OTHER; note = 2'-O-methoxyethyl modified nucleotide with phosphorothioate linkage
  modified_base 9: mod_base = OTHER; note = 2'-O-methoxyethyl modified nucleotide with phosphorothioate linkage
  modified_base 10: mod_base = OTHER; note = Nucleotide with phosphorothioate linkage
  modified_base 11: mod_base = OTHER; note = Nucleotide with phosphorothioate linkage
  modified_base 12: mod_base = OTHER; note = Thymine with phosphorothioate linkage
  modified_base 13: mod_base = OTHER; note = Nucleotide with phosphorothioate linkage
  modified_base 14: mod_base = OTHER; note = Nucleotide with phosphorothioate linkage
  modified_base 15: mod_base = OTHER; note = Nucleotide with phosphorothioate linkage
  modified_base 16: mod_base = OTHER; note = Nucleotide with phosphorothioate linkage
  modified_base 17: mod_base = OTHER; note = 5-methylcytosine with phosphorothioate linkage
  modified_base 18: mod_base = OTHER; note = Nucleotide with phosphorothioate linkage
  modified_base 19: mod_base = OTHER; note = Nucleotide with phosphorothioate linkage
  modified_base 20: mod_base = OTHER; note = 2'-O-methoxyethyl modified nucleotide with phosphorothioate linkage
  modified_base 21: mod_base = OTHER; note = 2'-O-methoxyethyl modified nucleotide with phosphorothioate linkage
  modified_base 22: mod_base = OTHER; note = 2'-O-methoxyethyl modified thymine with phosphorothioate linkage
  modified_base 23: mod_base = OTHER; note = 2'-O-methoxyethyl modified nucleotide with phosphorothioate linkage
  modified_base 24: mod_base = OTHER; note = 2'-O-methoxyethyl 5-methylcytosine
  misc_feature 1..9: note = RNA
  misc_feature 10..19: note = DNA
  misc_feature 20..24: note = RNA
ttatgcagaggtgaagcgaagtgc

SEQ ID NO: 48 - DNA, 26 bp, synthetic construct
  source 1..26: mol_type = other DNA
  modified_base 7: mod_base = OTHER; note = 2'-O-methoxyethyl modified nucleotide with phosphorothioate linkage
  modified_base 8: mod_base = OTHER; note = 2'-O-methoxyethyl 5-methylcytosine with phosphorothioate linkage
  modified_base 9: mod_base = OTHER; note = 2'-O-methoxyethyl modified nucleotide with phosphorothioate linkage
  modified_base 10: mod_base = OTHER; note = 2'-O-methoxyethyl modified nucleotide with phosphorothioate linkage
  modified_base 11: mod_base = OTHER; note = 2'-O-methoxyethyl modified nucleotide with phosphorothioate linkage
  modified_base 12: mod_base = OTHER; note = Nucleotide with phosphorothioate linkage
  modified_base 13: mod_base = OTHER; note = Nucleotide with phosphorothioate linkage
  modified_base 14: mod_base = OTHER; note = Thymine with phosphorothioate linkage
  modified_base 15: mod_base = OTHER; note = Nucleotide with phosphorothioate linkage
  modified_base 16: mod_base = OTHER; note = Nucleotide with phosphorothioate linkage
  modified_base 17: mod_base = OTHER; note = Nucleotide with phosphorothioate linkage
  modified_base 18: mod_base = OTHER; note = Nucleotide with phosphorothioate linkage
  modified_base 19: mod_base = OTHER; note = 5-methylcytosine with phosphorothioate linkage
  modified_base 20: mod_base = OTHER; note = Nucleotide with phosphorothioate linkage
  modified_base 21: mod_base = OTHER; note = Nucleotide with phosphorothioate linkage
  modified_base 22: mod_base = OTHER; note = 2'-O-methoxyethyl modified nucleotide with phosphorothioate linkage
  modified_base 23: mod_base = OTHER; note = 2'-O-methoxyethyl modified nucleotide with phosphorothioate linkage
  modified_base 24: mod_base = OTHER; note = 2'-O-methoxyethyl modified thymine with phosphorothioate linkage
  modified_base 25: mod_base = OTHER; note = 2'-O-methoxyethyl modified nucleotide with phosphorothioate linkage
  modified_base 26: mod_base = OTHER; note = 2'-O-methoxyethyl 5-methylcytosine
  misc_feature 1..11: note = RNA
  misc_feature 12..21: note = DNA
  misc_feature 22..26: note = RNA
tattatgcagaggtgaagcgaagtgc

SEQ ID NO: 49 - DNA, 20 bp, synthetic construct
  source 1..20: mol_type = other DNA
  modified_base 1: mod_base = OTHER; note = 2'-O-methoxyethyl modified nucleotide with phosphorothioate linkage
  modified_base 2: mod_base = OTHER; note = 2'-O-methoxyethyl 5-methylcytosine with phosphorothioate linkage
  modified_base 3: mod_base = OTHER; note = 2'-O-methoxyethyl modified nucleotide with phosphorothioate linkage
  modified_base 4: mod_base = OTHER; note = 2'-O-methoxyethyl modified nucleotide with phosphorothioate linkage
  modified_base 5: mod_base = OTHER; note = 2'-O-methoxyethyl modified nucleotide with phosphorothioate linkage
  modified_base 6: mod_base = OTHER; note = 2'-O-cyclopropyl modified nucleotide with phosphorothioate linkage
  modified_base 7: mod_base = OTHER; note = Nucleotide with phosphorothioate linkage
  modified_base 8: mod_base = OTHER; note = Thymine with phosphorothioate linkage
  modified_base 9: mod_base = OTHER; note = Nucleotide with phosphorothioate linkage
  modified_base 10: mod_base = OTHER; note = Nucleotide with phosphorothioate linkage
  modified_base 11: mod_base = OTHER; note = Nucleotide with phosphorothioate linkage
  modified_base 12: mod_base = OTHER; note = Nucleotide with phosphorothioate linkage
  modified_base 13: mod_base = OTHER; note = 5-methylcytosine with phosphorothioate linkage
  modified_base 14: mod_base = OTHER; note = Nucleotide with phosphorothioate linkage
  modified_base 15: mod_base = OTHER; note = Nucleotide with phosphorothioate linkage
  modified_base 16: mod_base = OTHER; note = 2'-O-methoxyethyl modified nucleotide with phosphorothioate linkage
  modified_base 17: mod_base = OTHER; note = 2'-O-methoxyethyl modified nucleotide with phosphorothioate linkage
  modified_base 18: mod_base = OTHER; note = 2'-O-methoxyethyl modified thymine with phosphorothioate linkage
  modified_base 19: mod_base = OTHER; note = 2'-O-methoxyethyl modified nucleotide with phosphorothioate linkage
  modified_base 20: mod_base = OTHER; note = 2'-O-methoxyethyl 5-methylcytosine
  misc_feature 1..6: note = RNA
  misc_feature 7..15: note = DNA
  misc_feature 16..20: note = RNA
gcagaggtgaagcgaagtgc

SEQ ID NO: 50 - DNA, 20 bp, synthetic construct
  source 1..20: mol_type = other DNA
  modified_base 1: mod_base = OTHER; note = 2'-O-methoxyethyl modified nucleotide with phosphorothioate linkage
  modified_base 2: mod_base = OTHER; note = 2'-O-methoxyethyl 5-methylcytosine with phosphorothioate linkage
  modified_base 3: mod_base = OTHER; note = 2'-O-methoxyethyl modified nucleotide with phosphorothioate linkage
  modified_base 4: mod_base = OTHER; note = 2'-O-methoxyethyl modified nucleotide with phosphorothioate linkage
  modified_base 5: mod_base = OTHER; note = 2'-O-methoxyethyl modified nucleotide with phosphorothioate linkage
  modified_base 6: mod_base = OTHER; note = Nucleotide with phosphorothioate linkage
  modified_base 7: mod_base = OTHER; note = 2'-O-cyclopropyl modified nucleotide with phosphorothioate linkage
  modified_base 8: mod_base = OTHER; note = Thymine with phosphorothioate linkage
  modified_base 9: mod_base = OTHER; note = Nucleotide with phosphorothioate linkage
  modified_base 10: mod_base = OTHER; note = Nucleotide with phosphorothioate linkage
  modified_base 11: mod_base = OTHER; note = Nucleotide with phosphorothioate linkage
  modified_base 12: mod_base = OTHER; note = Nucleotide with phosphorothioate linkage
  modified_base 13: mod_base = OTHER; note = 5-methylcytosine with phosphorothioate linkage
  modified_base 14: mod_base = OTHER; note = Nucleotide with phosphorothioate linkage
  modified_base 15: mod_base = OTHER; note = Nucleotide with phosphorothioate linkage
  modified_base 16: mod_base = OTHER; note = 2'-O-methoxyethyl modified nucleotide with phosphorothioate linkage
  modified_base 17: mod_base = OTHER; note = 2'-O-methoxyethyl modified nucleotide with phosphorothioate linkage
  modified_base 18: mod_base = OTHER; note = 2'-O-methoxyethyl modified thymine with phosphorothioate linkage
  modified_base 19: mod_base = OTHER; note = 2'-O-methoxyethyl modified nucleotide with phosphorothioate linkage
  modified_base 20: mod_base = OTHER; note = 2'-O-methoxyethyl 5-methylcytosine
  misc_feature 1..5: note = RNA
  misc_feature 6: note = DNA
  misc_feature 7: note = RNA
  misc_feature 8..15: note = DNA
  misc_feature 16..20: note = RNA
gcagaggtgaagcgaagtgc

SEQ ID NO: 51 - DNA, 20 bp, synthetic construct
  source 1..20: mol_type = other DNA
  modified_base 1: mod_base = OTHER; note = 2'-O-methoxyethyl modified nucleotide with phosphorothioate linkage
  modified_base 2: mod_base = OTHER; note = 2'-O-methoxyethyl 5-methylcytosine with phosphorothioate linkage
  modified_base 3: mod_base = OTHER; note = 2'-O-methoxyethyl modified nucleotide with phosphorothioate linkage
  modified_base 4: mod_base = OTHER; note = 2'-O-methoxyethyl modified nucleotide with phosphorothioate linkage
  modified_base 5: mod_base = OTHER; note = 2'-O-methoxyethyl modified nucleotide with phosphorothioate linkage
  modified_base 6: mod_base = OTHER; note = Nucleotide with phosphorothioate linkage
  modified_base 7: mod_base = OTHER; note = Nucleotide with phosphorothioate linkage
  modified_base 8: mod_base = OTHER; note = 2'-O-cyclopropyl modified nucleotide with phosphorothioate linkage
  modified_base 9: mod_base = OTHER; note = Nucleotide with phosphorothioate linkage
  modified_base 10: mod_base = OTHER; note = Nucleotide with phosphorothioate linkage
  modified_base 11: mod_base = OTHER; note = Nucleotide with phosphorothioate linkage
  modified_base 12: mod_base = OTHER; note = Nucleotide with phosphorothioate linkage
  modified_base 13: mod_base = OTHER; note = 5-methylcytosine with phosphorothioate linkage
  modified_base 14: mod_base = OTHER; note = Nucleotide with phosphorothioate linkage
  modified_base 15: mod_base = OTHER; note = Nucleotide with phosphorothioate linkage
  modified_base 16: mod_base = OTHER; note = 2'-O-methoxyethyl modified nucleotide with phosphorothioate linkage
  modified_base 17: mod_base = OTHER; note = 2'-O-methoxyethyl modified nucleotide with phosphorothioate linkage
  modified_base 18: mod_base = OTHER; note = 2'-O-methoxyethyl modified thymine with phosphorothioate linkage
  modified_base 19: mod_base = OTHER; note = 2'-O-methoxyethyl modified nucleotide with phosphorothioate linkage
  modified_base 20: mod_base = OTHER; note = 2'-O-methoxyethyl 5-methylcytosine
  misc_feature 1..5: note = RNA
  misc_feature 6..7: note = DNA
  misc_feature 8: note = RNA
  misc_feature 9..15: note = DNA
  misc_feature 16..20: note = RNA
gcagaggtgaagcgaagtgc

SEQ ID NO: 52 - DNA, 20 bp, synthetic construct
  source 1..20: mol_type = other DNA
  modified_base 1: mod_base = OTHER; note = 2'-O-methoxyethyl modified nucleotide with phosphorothioate linkage
  modified_base 2: mod_base = OTHER; note = 2'-O-methoxyethyl 5-methylcytosine with phosphorothioate linkage
  modified_base 3: mod_base = OTHER; note = 2'-O-methoxyethyl modified nucleotide with phosphorothioate linkage
  modified_base 4: mod_base = OTHER; note = 2'-O-methoxyethyl modified nucleotide with phosphorothioate linkage
  modified_base 5: mod_base = OTHER; note = 2'-O-methoxyethyl modified nucleotide with phosphorothioate linkage
  modified_base 6: mod_base = OTHER; note = 2'-O-methylcyclopropyl modified nucleotide with phosphorothioate linkage
  modified_base 7: mod_base = OTHER; note = Nucleotide with phosphorothioate linkage
  modified_base 8: mod_base = OTHER; note = Thymine with phosphorothioate linkage
  modified_base 9: mod_base = OTHER; note = Nucleotide with phosphorothioate linkage
  modified_base 10: mod_base = OTHER; note = Nucleotide with phosphorothioate linkage
  modified_base 11: mod_base = OTHER; note = Nucleotide with phosphorothioate linkage
  modified_base 12: mod_base = OTHER; note = Nucleotide with phosphorothioate linkage
  modified_base 13: mod_base = OTHER; note = 5-methylcytosine with phosphorothioate linkage
  modified_base 14: mod_base = OTHER; note = Nucleotide with phosphorothioate linkage
  modified_base 15: mod_base = OTHER; note = Nucleotide with phosphorothioate linkage
  modified_base 16: mod_base = OTHER; note = 2'-O-methoxyethyl modified nucleotide with phosphorothioate linkage
  modified_base 17: mod_base = OTHER; note = 2'-O-methoxyethyl modified nucleotide with phosphorothioate linkage
  modified_base 18: mod_base = OTHER; note = 2'-O-methoxyethyl modified thymine with phosphorothioate linkage
  modified_base 19: mod_base = OTHER; note = 2'-O-methoxyethyl modified nucleotide with phosphorothioate linkage
  modified_base 20: mod_base = OTHER; note = 2'-O-methoxyethyl 5-methylcytosine
  misc_feature 1..6: note = RNA
  misc_feature 7..15: note = DNA
  misc_feature 16..20: note = RNA
gcagaggtgaagcgaagtgc

SEQ ID NO: 53 - DNA, 20 bp, synthetic construct
  source 1..20: mol_type = other DNA
  modified_base 1: mod_base = OTHER; note = 2'-O-methoxyethyl modified nucleotide with phosphorothioate linkage
  modified_base 2: mod_base = OTHER; note = 2'-O-methoxyethyl 5-methylcytosine with phosphorothioate linkage
  modified_base 3: mod_base = OTHER; note = 2'-O-methoxyethyl modified nucleotide with phosphorothioate linkage
  modified_base 4: mod_base = OTHER; note = 2'-O-methoxyethyl modified nucleotide with phosphorothioate linkage
  modified_base 5: mod_base = OTHER; note = 2'-O-methoxyethyl modified nucleotide with phosphorothioate linkage
  modified_base 6: mod_base = OTHER; note = Nucleotide with phosphorothioate linkage
  modified_base 7: mod_base = OTHER; note = 2'-O-methylcyclopropyl modified nucleotide with phosphorothioate linkage
  modified_base 8: mod_base = OTHER; note = Thymine with phosphorothioate linkage
  modified_base 9: mod_base = OTHER; note = Nucleotide with phosphorothioate linkage
  modified_base 10: mod_base = OTHER; note = Nucleotide with phosphorothioate linkage
  modified_base 11: mod_base = OTHER; note = Nucleotide with phosphorothioate linkage
  modified_base 12: mod_base = OTHER; note = Nucleotide with phosphorothioate linkage
  modified_base 13: mod_base = OTHER; note = 5-methylcytosine with phosphorothioate linkage
  modified_base 14: mod_base = OTHER; note = Nucleotide with phosphorothioate linkage
  modified_base 15: mod_base = OTHER; note = Nucleotide with phosphorothioate linkage
  modified_base 16: mod_base = OTHER; note = 2'-O-methoxyethyl modified nucleotide with phosphorothioate linkage
  modified_base 17: mod_base = OTHER; note = 2'-O-methoxyethyl modified nucleotide with phosphorothioate linkage
  modified_base 18: mod_base = OTHER; note = 2'-O-methoxyethyl modified thymine with phosphorothioate linkage
  modified_base 19: mod_base = OTHER; note = 2'-O-methoxyethyl modified nucleotide with phosphorothioate linkage
  modified_base 20: mod_base = OTHER; note = 2'-O-methoxyethyl 5-methylcytosine
  misc_feature 1..5: note = RNA
  misc_feature 6: note = DNA
  misc_feature 7: note = RNA
  misc_feature 8..15: note = DNA
  misc_feature 16..20: note = RNA
gcagaggtgaagcgaagtgc

SEQ ID NO: 54 - DNA, 20 bp, synthetic construct
  source 1..20: mol_type = other DNA
  modified_base 1: mod_base = OTHER; note = 2'-O-methoxyethyl modified nucleotide with phosphorothioate linkage
  modified_base 2: mod_base = OTHER; note = 2'-O-methoxyethyl 5-methylcytosine with phosphorothioate linkage
  modified_base 3: mod_base = OTHER; note = 2'-O-methoxyethyl modified nucleotide with phosphorothioate linkage
  modified_base 4: mod_base = OTHER; note = 2'-O-methoxyethyl modified nucleotide with phosphorothioate linkage
  modified_base 5: mod_base = OTHER; note = 2'-O-methoxyethyl modified nucleotide with phosphorothioate linkage
  modified_base 6: mod_base = OTHER; note = Nucleotide with phosphorothioate linkage
  modified_base 7: mod_base = OTHER; note = Nucleotide with phosphorothioate linkage
  modified_base 8: mod_base = OTHER; note = 2'-O-methylcyclopropyl modified nucleotide with phosphorothioate linkage
  modified_base 9: mod_base = OTHER; note = Nucleotide with phosphorothioate linkage
  modified_base 10: mod_base = OTHER; note = Nucleotide with phosphorothioate linkage
  modified_base 11: mod_base = OTHER; note = Nucleotide with phosphorothioate linkage
  modified_base 12: mod_base = OTHER; note = Nucleotide with phosphorothioate linkage
  modified_base 13: mod_base = OTHER; note = 5-methylcytosine with phosphorothioate linkage
  modified_base 14: mod_base = OTHER; note = Nucleotide with phosphorothioate linkage
  modified_base 15: mod_base = OTHER; note = Nucleotide with phosphorothioate linkage
  modified_base 16: mod_base = OTHER; note = 2'-O-methoxyethyl modified nucleotide with phosphorothioate linkage
  modified_base 17: mod_base = OTHER; note = 2'-O-methoxyethyl modified nucleotide with phosphorothioate linkage
  modified_base 18: mod_base = OTHER; note = 2'-O-methoxyethyl modified thymine with phosphorothioate linkage
  modified_base 19: mod_base = OTHER; note = 2'-O-methoxyethyl modified nucleotide with phosphorothioate linkage
  modified_base 20: mod_base = OTHER; note = 2'-O-methoxyethyl 5-methylcytosine
  misc_feature 1..5: note = RNA
  misc_feature 6..7: note = DNA
  misc_feature 8: note = RNA
  misc_feature 9..15: note = DNA
  misc_feature 16..20: note = RNA
gcagaggtgaagcgaagtgc

SEQ ID NO: 55 - DNA, 20 bp, synthetic construct
  source 1..20: mol_type = other DNA
  modified_base 1: mod_base = OTHER; note = 2'-O-methoxyethyl modified nucleotide with phosphorothioate linkage
  modified_base 2: mod_base = OTHER; note = 2'-O-methoxyethyl 5-methylcytosine with phosphorothioate linkage
  modified_base 3: mod_base = OTHER; note = 2'-O-methoxyethyl modified nucleotide with phosphorothioate linkage
  modified_base 4: mod_base = OTHER; note = 2'-O-methoxyethyl modified nucleotide with phosphorothioate linkage
  modified_base 5: mod_base = OTHER; note = 2'-O-methoxyethyl modified nucleotide with phosphorothioate linkage
  modified_base 6: mod_base = OTHER; note = Nucleotide with phosphorothioate linkage
  modified_base 7: mod_base = OTHER; note = 2'-O-methyl-3'-xylo modified nucleotide with phosphorothioate linkage
  modified_base 8: mod_base = OTHER; note = Thymine with phosphorothioate linkage
  modified_base 9: mod_base = OTHER; note = Nucleotide with phosphorothioate linkage
  modified_base 10: mod_base = OTHER; note = Nucleotide with phosphorothioate linkage
  modified_base 11: mod_base = OTHER; note = Nucleotide with phosphorothioate linkage
  modified_base 12: mod_base = OTHER; note = Nucleotide with phosphorothioate linkage
  modified_base 13: mod_base = OTHER; note = 5-methylcytosine with phosphorothioate linkage
  modified_base 14: mod_base = OTHER; note = Nucleotide with phosphorothioate linkage
  modified_base 15: mod_base = OTHER; note = Nucleotide with phosphorothioate linkage
  modified_base 16: mod_base = OTHER; note = 2'-O-methoxyethyl modified nucleotide with phosphorothioate linkage
  modified_base 17: mod_base = OTHER; note = 2'-O-methoxyethyl modified nucleotide with phosphorothioate linkage
  modified_base 18: mod_base = OTHER; note = 2'-O-methoxyethyl modified thymine with phosphorothioate linkage
  modified_base 19: mod_base = OTHER; note = 2'-O-methoxyethyl modified nucleotide with phosphorothioate linkage
  modified_base 20: mod_base = OTHER; note = 2'-O-methoxyethyl 5-methylcytosine
  misc_feature 1..5: note = RNA
  misc_feature 6: note = DNA
  misc_feature 7: note = RNA
  misc_feature 8..15: note = DNA
  misc_feature 16..20: note = RNA
gcagaggtgaagcgaagtgc

SEQ ID NO: 56 - DNA, 20 bp, synthetic construct
  source 1..20: mol_type = other DNA
  modified_base 1: mod_base = OTHER; note = 2'-O-methoxyethyl modified nucleotide with phosphorothioate linkage
  modified_base 2: mod_base = OTHER; note = 2'-O-methoxyethyl 5-methylcytosine with phosphorothioate linkage
  modified_base 3: mod_base = OTHER; note = 2'-O-methoxyethyl modified nucleotide with phosphorothioate linkage
  modified_base 4: mod_base = OTHER; note = 2'-O-methoxyethyl modified nucleotide with phosphorothioate linkage
  modified_base 5: mod_base = OTHER; note = 2'-O-methoxyethyl modified nucleotide with phosphorothioate linkage
  modified_base 6: mod_base = OTHER; note = 2'-O-methyl-3'-xylo modified nucleotide with phosphorothioate linkage
  modified_base 7: mod_base = OTHER; note = Nucleotide with phosphorothioate linkage
  modified_base 8: mod_base = OTHER; note = Thymine with phosphorothioate linkage
  modified_base 9: mod_base = OTHER; note = Nucleotide with phosphorothioate linkage
  modified_base 10: mod_base = OTHER; note = Nucleotide with phosphorothioate linkage
  modified_base 11: mod_base = OTHER; note = Nucleotide with phosphorothioate linkage
  modified_base 12: mod_base = OTHER; note = Nucleotide with phosphorothioate linkage
  modified_base 13: mod_base = OTHER; note = 5-methylcytosine with phosphorothioate linkage
  modified_base 14: mod_base = OTHER; note = Nucleotide with phosphorothioate linkage
  modified_base 15: mod_base = OTHER; note = Nucleotide with phosphorothioate linkage
  modified_base 16: mod_base = OTHER; note = 2'-O-methoxyethyl modified nucleotide with phosphorothioate linkage
  modified_base 17: mod_base = OTHER; note = 2'-O-methoxyethyl modified nucleotide with phosphorothioate linkage
  modified_base 18: mod_base = OTHER; note = 2'-O-methoxyethyl modified thymine with phosphorothioate linkage
  modified_base 19: mod_base = OTHER; note = 2'-O-methoxyethyl modified nucleotide with phosphorothioate linkage
  modified_base 20: mod_base = OTHER; note = 2'-O-methoxyethyl 5-methylcytosine
  misc_feature 1..6: note = RNA
  misc_feature 7..15: note = DNA
  misc_feature 16..20: note = RNA
gcagaggtgaagcgaagtgc

SEQ ID NO: 57 - DNA, 20 bp, synthetic construct
  source 1..20: mol_type = other DNA
  modified_base 1: mod_base = OTHER; note = 2'-O-methoxyethyl modified nucleotide with phosphorothioate linkage
  modified_base 2: mod_base = OTHER; note = 2'-O-methoxyethyl 5-methylcytosine with phosphorothioate linkage
  modified_base 3: mod_base = OTHER; note = 2'-O-methoxyethyl modified nucleotide with phosphorothioate linkage
  modified_base 4: mod_base = OTHER; note = 2'-O-methoxyethyl modified nucleotide with phosphorothioate linkage
  modified_base 5: mod_base = OTHER; note = 2'-O-methoxyethyl modified nucleotide with phosphorothioate linkage
  modified_base 6: mod_base = OTHER; note = Nucleotide with phosphorothioate linkage
  modified_base 7: mod_base = OTHER; note = Nucleotide with phosphorothioate linkage
  modified_base 8: mod_base = OTHER; note = 2'-O-methyl-3'-xylo modified nucleotide with phosphorothioate linkage
  modified_base 9: mod_base = OTHER; note = Nucleotide with phosphorothioate linkage
  modified_base 10: mod_base = OTHER; note = Nucleotide with phosphorothioate linkage
  modified_base 11: mod_base = OTHER; note = Nucleotide with phosphorothioate linkage
  modified_base 12: mod_base = OTHER; note = Nucleotide with phosphorothioate linkage
  modified_base 13: mod_base = OTHER; note = 5-methylcytosine with phosphorothioate linkage
  modified_base 14: mod_base = OTHER; note = Nucleotide with phosphorothioate linkage
  modified_base 15: mod_base = OTHER; note = Nucleotide with phosphorothioate linkage
  modified_base 16: mod_base = OTHER; note = 2'-O-methoxyethyl modified nucleotide with phosphorothioate linkage
  modified_base 17: mod_base = OTHER; note = 2'-O-methoxyethyl modified nucleotide with phosphorothioate linkage
  modified_base 18: mod_base = OTHER; note = 2'-O-methoxyethyl modified thymine with phosphorothioate linkage
  modified_base 19: mod_base = OTHER; note = 2'-O-methoxyethyl modified nucleotide with phosphorothioate linkage
  modified_base 20: mod_base = OTHER; note = 2'-O-methoxyethyl 5-methylcytosine
  misc_feature 1..5: note = RNA
  misc_feature 6..7: note = DNA
  misc_feature 8: note = RNA
  misc_feature 9..15: note = DNA
  misc_feature 16..20: note = RNA
gcagaggtgaagcgaagtgc

SEQ ID NO: 58 - DNA, 21 bp, synthetic construct
  source 1..21: mol_type = other DNA
  modified_base 1: mod_base = OTHER; note = 2'-O-methoxyethyl modified nucleotide with phosphorothioate linkage
  modified_base 2: mod_base = OTHER; note = 2'-O-methoxyethyl 5-methylcytosine with phosphorothioate linkage
  modified_base 3: mod_base = OTHER; note = 2'-O-methoxyethyl modified nucleotide with phosphorothioate linkage
  modified_base 4: mod_base = OTHER; note = 2'-O-methoxyethyl modified nucleotide with phosphorothioate linkage
  modified_base 5: mod_base = OTHER; note = 2'-O-methoxyethyl modified nucleotide with phosphorothioate linkage
  modified_base 6: mod_base = OTHER; note = Nucleotide with phosphorothioate linkage
  modified_base 7: mod_base = OTHER; note = Nucleotide with phosphorothioate linkage
  modified_base 8: mod_base = OTHER; note = Thymine with phosphorothioate linkage
  modified_base 9: mod_base = OTHER; note = Nucleotide with phosphorothioate linkage
  modified_base 10: mod_base = OTHER; note = Nucleotide with phosphorothioate linkage
  modified_base 11: mod_base = OTHER; note = Nucleotide with phosphorothioate linkage
  modified_base 12: mod_base = OTHER; note = Nucleotide with phosphorothioate linkage
  modified_base 13: mod_base = OTHER; note = 5-methylcytosine with phosphorothioate linkage
  modified_base 14: mod_base = OTHER; note = Nucleotide with phosphorothioate linkage
  modified_base 15: mod_base = OTHER; note = Nucleotide with phosphorothioate linkage
  modified_base 16: mod_base = OTHER; note = 2'-O-methoxyethyl modified nucleotide with phosphorothioate linkage
  modified_base 17: mod_base = OTHER; note = 2'-O-methoxyethyl modified nucleotide with phosphorothioate linkage
  modified_base 18: mod_base = OTHER; note = 2'-O-methoxyethyl modified thymine with phosphorothioate linkage
  modified_base 19: mod_base = OTHER; note = 2'-O-methoxyethyl modified nucleotide with phosphorothioate linkage
  modified_base 20: mod_base = OTHER; note = 2'-O-methoxyethyl 5-methylcytosine
  misc_feature 1..5: note = RNA
  misc_feature 6..15: note = DNA
  misc_feature 16..21: note = RNA
gcagaggtgaagcgaagtgct

SEQ ID NO: 59 - DNA, 22 bp, synthetic construct
  source 1..22: mol_type = other DNA
  modified_base 1: mod_base = OTHER; note = 2'-O-methoxyethyl modified nucleotide with phosphorothioate linkage
  modified_base 2: mod_base = OTHER; note = 2'-O-methoxyethyl 5-methylcytosine with phosphorothioate linkage
  modified_base 3: mod_base = OTHER; note = 2'-O-methoxyethyl modified nucleotide with phosphorothioate linkage
  modified_base 4: mod_base = OTHER; note = 2'-O-methoxyethyl modified nucleotide with phosphorothioate linkage
  modified_base 5: mod_base = OTHER; note = 2'-O-methoxyethyl modified nucleotide with phosphorothioate linkage
  modified_base 6: mod_base = OTHER; note = Nucleotide with phosphorothioate linkage
  modified_base 7: mod_base = OTHER; note = Nucleotide with phosphorothioate linkage
  modified_base 8: mod_base = OTHER; note = Thymine with phosphorothioate linkage
  modified_base 9: mod_base = OTHER; note = Nucleotide with phosphorothioate linkage
  modified_base 10: mod_base = OTHER; note = Nucleotide with phosphorothioate linkage
  modified_base 11: mod_base = OTHER; note = Nucleotide with phosphorothioate linkage
  modified_base 12: mod_base = OTHER; note = Nucleotide with phosphorothioate linkage
  modified_base 13: mod_base = OTHER; note = 5-methylcytosine with phosphorothioate linkage
  modified_base 14: mod_base = OTHER; note = Nucleotide with phosphorothioate linkage
  modified_base 15: mod_base = OTHER; note = Nucleotide with phosphorothioate linkage
  modified_base 16: mod_base = OTHER; note = 2'-O-methoxyethyl modified nucleotide with phosphorothioate linkage
  modified_base 17: mod_base = OTHER; note = 2'-O-methoxyethyl modified nucleotide with phosphorothioate linkage
  modified_base 18: mod_base = OTHER; note = 2'-O-methoxyethyl modified thymine with phosphorothioate linkage
  modified_base 19: mod_base = OTHER; note = 2'-O-methoxyethyl modified nucleotide with phosphorothioate linkage
  modified_base 20: mod_base = OTHER; note = 2'-O-methoxyethyl 5-methylcytosine
  modified_base 21: mod_base = OTHER; note = Nucleotide with phosphorothioate linkage
  misc_feature 1..5: note = RNA
  misc_feature 6..15: note = DNA
  misc_feature 16..22: note = RNA
gcagaggtgaagcgaagtgctt

SEQ ID NO: 60 - DNA, 23 bp, synthetic construct
  source 1..23: mol_type = other DNA
  modified_base 1: mod_base = OTHER; note = 2'-O-methoxyethyl modified nucleotide with phosphorothioate linkage
  modified_base 2: mod_base = OTHER; note = 2'-O-methoxyethyl 5-methylcytosine with phosphorothioate linkage
  modified_base 3: mod_base = OTHER; note = 2'-O-methoxyethyl modified nucleotide with phosphorothioate linkage
  modified_base 4: mod_base = OTHER; note = 2'-O-methoxyethyl modified nucleotide with phosphorothioate linkage
  modified_base 5: mod_base = OTHER; note = 2'-O-methoxyethyl modified nucleotide with phosphorothioate linkage
  modified_base 6: mod_base = OTHER; note = Nucleotide with phosphorothioate linkage
  modified_base 7: mod_base = OTHER; note = Nucleotide with phosphorothioate linkage
  modified_base 8: mod_base = OTHER; note = Thymine with phosphorothioate linkage
  modified_base 9: mod_base = OTHER; note = Nucleotide with phosphorothioate linkage
  modified_base 10: mod_base = OTHER; note = Nucleotide with phosphorothioate linkage
  modified_base 11: mod_base = OTHER; note = Nucleotide with phosphorothioate linkage
  modified_base 12: mod_base = OTHER; note = Nucleotide with phosphorothioate linkage
  modified_base 13: mod_base = OTHER; note = 5-methylcytosine with phosphorothioate linkage
  modified_base 14: mod_base = OTHER; note = Nucleotide with phosphorothioate linkage
  modified_base 15: mod_base = OTHER; note = Nucleotide with phosphorothioate linkage
  modified_base 16: mod_base = OTHER; note = 2'-O-methoxyethyl modified nucleotide with phosphorothioate linkage
  modified_base 17: mod_base = OTHER; note = 2'-O-methoxyethyl modified nucleotide with phosphorothioate linkage
  modified_base 18: mod_base = OTHER; note = 2'-O-methoxyethyl modified thymine with phosphorothioate linkage
  modified_base 19: mod_base = OTHER; note = 2'-O-methoxyethyl modified nucleotide with phosphorothioate linkage
  modified_base 20: mod_base = OTHER; note = 2'-O-methoxyethyl 5-methylcytosine
  modified_base 21: mod_base = OTHER; note = Nucleotide with phosphorothioate linkage
  modified_base 22: mod_base = OTHER; note = Nucleotide with phosphorothioate linkage
  misc_feature 1..5: note = RNA
  misc_feature 6..15: note = DNA
  misc_feature 16..23: note = RNA
gcagaggtgaagcgaagtgcttt

SEQ ID NO: 61 - DNA, 22 bp, synthetic construct
  source 1..22: mol_type = other DNA
  modified_base 1: mod_base = OTHER; note = 2'-O-methoxyethyl modified nucleotide with phosphorothioate linkage
  modified_base 2: mod_base = OTHER; note = 2'-O-methoxyethyl 5-methylcytosine with phosphorothioate linkage
  modified_base 3: mod_base = OTHER; note = 2'-O-methoxyethyl modified nucleotide with phosphorothioate linkage
  modified_base 4: mod_base = OTHER; note = 2'-O-methoxyethyl modified nucleotide with phosphorothioate linkage
  modified_base 5: mod_base = OTHER; note = 2'-O-methoxyethyl modified nucleotide with phosphorothioate linkage
  modified_base 6: mod_base = OTHER; note = Nucleotide with phosphorothioate linkage
  modified_base 7: mod_base = OTHER; note = Nucleotide with phosphorothioate linkage
  modified_base 8: mod_base = OTHER; note = Thymine with phosphorothioate linkage
  modified_base 9: mod_base = OTHER; note = Nucleotide with phosphorothioate linkage
  modified_base 10: mod_base = OTHER; note = Nucleotide with phosphorothioate linkage
  modified_base 11: mod_base = OTHER; note = Nucleotide with phosphorothioate linkage
  modified_base 12: mod_base = OTHER; note = Nucleotide with phosphorothioate linkage
  modified_base 13: mod_base = OTHER; note = 5-methylcytosine with phosphorothioate linkage
  modified_base 14: mod_base = OTHER; note = Nucleotide with phosphorothioate linkage
  modified_base 15: mod_base = OTHER; note = Nucleotide with phosphorothioate linkage
  modified_base 16: mod_base = OTHER; note = 2'-O-methoxyethyl modified nucleotide with phosphorothioate linkage
  modified_base 17: mod_base = OTHER; note = 2'-O-methoxyethyl modified nucleotide with phosphorothioate linkage
  modified_base 18: mod_base = OTHER; note = 2'-O-methoxyethyl modified thymine with phosphorothioate linkage
  modified_base 19: mod_base = OTHER; note = 2'-O-methoxyethyl modified nucleotide with phosphorothioate linkage
  modified_base 20: mod_base = OTHER; note = 2'-O-methoxyethyl 5-methylcytosine
  modified_base 21: mod_base = OTHER; note = Nucleotide with phosphorothioate linkage
  misc_feature 1..5: note = RNA
  misc_feature 6..15: note = DNA
  misc_feature 16..22: note = RNA
gcagaggtgaagcgaagtgctg

SEQ ID NO: 62 - DNA, 22 bp, synthetic construct
  source 1..22: mol_type = other DNA
  modified_base 1: mod_base = OTHER; note = 2'-O-methoxyethyl modified nucleotide with phosphorothioate linkage
  modified_base 2: mod_base = OTHER; note = 2'-O-methoxyethyl 5-methylcytosine with phosphorothioate linkage
  modified_base 3: mod_base = OTHER; note = 2'-O-methoxyethyl modified nucleotide with phosphorothioate linkage
  modified_base 4: mod_base = OTHER; note = 2'-O-methoxyethyl modified nucleotide with phosphorothioate linkage
  modified_base 5: mod_base = OTHER; note = 2'-O-methoxyethyl modified nucleotide with phosphorothioate linkage
  modified_base 6: mod_base = OTHER; note = Nucleotide with phosphorothioate linkage
  modified_base 7: mod_base = OTHER; note = Nucleotide with phosphorothioate linkage
  modified_base 8: mod_base = OTHER; note = Thymine with phosphorothioate linkage
  modified_base 9: mod_base = OTHER; note = Nucleotide with phosphorothioate linkage
  modified_base 10: mod_base = OTHER; note = Nucleotide with phosphorothioate linkage
  modified_base 11: mod_base = OTHER; note = Nucleotide with phosphorothioate linkage
  modified_base 12: mod_base = OTHER; note = Nucleotide with phosphorothioate linkage
  modified_base 13: mod_base = OTHER; note = 5-methylcytosine with phosphorothioate linkage
  modified_base 14: mod_base = OTHER; note = Nucleotide with phosphorothioate linkage
  modified_base 15: mod_base = OTHER; note = Nucleotide with phosphorothioate linkage
  modified_base 16: mod_base = OTHER; note = 2'-O-methoxyethyl modified nucleotide with phosphorothioate linkage
  modified_base 17: mod_base = OTHER; note = 2'-O-methoxyethyl modified nucleotide with phosphorothioate linkage
  modified_base 18: mod_base = OTHER; note = 2'-O-methoxyethyl modified thymine with phosphorothioate linkage
  modified_base 19: mod_base = OTHER; note = 2'-O-methoxyethyl modified nucleotide with phosphorothioate linkage
  modified_base 20: mod_base = OTHER; note = 2'-O-methoxyethyl 5-methylcytosine with phosphorothioate linkage
  modified_base 21: mod_base = OTHER; note = Nucleotide with phosphorothioate linkage
  misc_feature 1..5: note = RNA
  misc_feature 6..15: note = DNA
  misc_feature 16..22: note = RNA
gcagaggtgaagcgaagtgctg

SEQ ID NO: 63 - DNA, 23 bp, synthetic construct
  source 1..23: mol_type = other DNA
  modified_base 1: mod_base = OTHER; note = 2'-O-methoxyethyl modified nucleotide with phosphorothioate linkage
  modified_base 2: mod_base = OTHER; note = 2'-O-methoxyethyl 5-methylcytosine with phosphorothioate linkage
  modified_base 3: mod_base = OTHER; note = 2'-O-methoxyethyl modified nucleotide with phosphorothioate linkage
  modified_base 4: mod_base = OTHER; note = 2'-O-methoxyethyl modified nucleotide with phosphorothioate linkage
  modified_base 5: mod_base = OTHER; note = 2'-O-methoxyethyl modified nucleotide with phosphorothioate linkage
  modified_base 6: mod_base = OTHER; note = Nucleotide with phosphorothioate linkage
  modified_base 7: mod_base = OTHER; note = Nucleotide with phosphorothioate linkage
  modified_base 8: mod_base = OTHER; note = Thymine with phosphorothioate linkage
  modified_base 9: mod_base = OTHER; note = Nucleotide with phosphorothioate linkage
  modified_base 10: mod_base = OTHER; note = Nucleotide with phosphorothioate linkage
  modified_base 11: mod_base = OTHER; note = Nucleotide with phosphorothioate linkage
  modified_base 12: mod_base = OTHER; note = Nucleotide with phosphorothioate linkage
  modified_base 13: mod_base = OTHER; note = 5-methylcytosine with phosphorothioate linkage
  modified_base 14: mod_base = OTHER; note = Nucleotide with phosphorothioate linkage
  modified_base 15: mod_base = OTHER; note = Nucleotide with phosphorothioate linkage
  modified_base 16: mod_base = OTHER; note = 2'-O-methoxyethyl modified nucleotide with phosphorothioate linkage
  modified_base 17: mod_base = OTHER; note = 2'-O-methoxyethyl modified nucleotide with phosphorothioate linkage
  modified_base 18: mod_base = OTHER; note = 2'-O-methoxyethyl modified thymine with phosphorothioate linkage
  modified_base 19: mod_base = OTHER; note = 2'-O-methoxyethyl modified nucleotide with phosphorothioate linkage
  modified_base 20: mod_base = OTHER; note = 2'-O-methoxyethyl 5-methylcytosine
  misc_feature 1..5: note = RNA
  misc_feature 6..15: note = DNA
  misc_feature 16..23: note = RNA
gcagaggtgaagcgaagtgcttg

SEQ ID NO: 64 - DNA, 23 bp, synthetic construct
  source 1..23: mol_type = other DNA
  modified_base 1: mod_base = OTHER; note = 2'-O-methoxyethyl modified nucleotide with phosphorothioate linkage
  modified_base 2: mod_base = OTHER; note = 2'-O-methoxyethyl 5-methylcytosine with phosphorothioate linkage
  modified_base 3: mod_base = OTHER; note = 2'-O-methoxyethyl modified nucleotide with phosphorothioate linkage
  modified_base 4: mod_base = OTHER; note = 2'-O-methoxyethyl modified nucleotide with phosphorothioate linkage
  modified_base 5: mod_base = OTHER; note = 2'-O-methoxyethyl modified nucleotide with phosphorothioate linkage
  modified_base 6: mod_base = OTHER; note = Nucleotide with phosphorothioate linkage
  modified_base 7: mod_base = OTHER; note = Nucleotide with phosphorothioate linkage
  modified_base 8: mod_base = OTHER; note = Thymine with phosphorothioate linkage
  modified_base 9: mod_base = OTHER; note = Nucleotide with phosphorothioate linkage
  modified_base 10: mod_base = OTHER; note = Nucleotide with phosphorothioate linkage
  modified_base 11: mod_base = OTHER; note = Nucleotide with phosphorothioate linkage
  modified_base 12: mod_base = OTHER; note = Nucleotide with phosphorothioate linkage
  modified_base 13: mod_base = OTHER; note = 5-methylcytosine with phosphorothioate linkage
  modified_base 14: mod_base = OTHER; note = Nucleotide with phosphorothioate linkage
  modified_base 15: mod_base = OTHER; note = Nucleotide with phosphorothioate linkage
  modified_base 16: mod_base = OTHER; note = 2'-O-methoxyethyl modified nucleotide with phosphorothioate linkage
  modified_base 17: mod_base = OTHER; note = 2'-O-methoxyethyl modified nucleotide with phosphorothioate linkage
  modified_base 18: mod_base = OTHER; note = 2'-O-methoxyethyl modified thymine with phosphorothioate linkage
  modified_base 19: mod_base = OTHER; note = 2'-O-methoxyethyl modified nucleotide with phosphorothioate linkage
  modified_base 20: mod_base = OTHER; note = 2'-O-methoxyethyl 5-methylcytosine
  modified_base 21: mod_base = OTHER; note = Nucleotide with phosphorothioate linkage
  misc_feature 1..5: note = RNA
  misc_feature 6..15: note = DNA
  misc_feature 16..23: note = RNA
gcagaggtgaagcgaagtgcttg

SEQ ID NO: 65 - DNA, 23 bp, synthetic construct
  source 1..23: mol_type = other DNA
  modified_base 1: mod_base = OTHER; note = 2'-O-methoxyethyl modified nucleotide with phosphorothioate linkage
  modified_base 2: mod_base = OTHER; note = 2'-O-methoxyethyl 5-methylcytosine with phosphorothioate linkage
  modified_base 3: mod_base = OTHER; note = 2'-O-methoxyethyl modified nucleotide with phosphorothioate linkage
  modified_base 4: mod_base = OTHER; note = 2'-O-methoxyethyl modified nucleotide with phosphorothioate linkage
  modified_base 5: mod_base = OTHER; note = 2'-O-methoxyethyl modified nucleotide with phosphorothioate linkage
  modified_base 6: mod_base = OTHER; note = Nucleotide with phosphorothioate linkage
  modified_base 7: mod_base = OTHER; note = Nucleotide with phosphorothioate linkage
  modified_base 8: mod_base = OTHER; note = Thymine with phosphorothioate linkage
  modified_base 9: mod_base = OTHER; note = Nucleotide with phosphorothioate linkage
  modified_base 10: mod_base = OTHER; note = Nucleotide with phosphorothioate linkage
  modified_base 11: mod_base = OTHER; note = Nucleotide with phosphorothioate linkage
  modified_base 12: mod_base = OTHER; note = Nucleotide with phosphorothioate linkage
  modified_base 13: mod_base = OTHER; note = 5-methylcytosine with phosphorothioate linkage
  modified_base 14: mod_base = OTHER; note = Nucleotide with phosphorothioate linkage
  modified_base 15: mod_base = OTHER; note = Nucleotide with phosphorothioate linkage
  modified_base 16: mod_base = OTHER; note = 2'-O-methoxyethyl modified nucleotide with phosphorothioate linkage
  modified_base 17: mod_base = OTHER; note = 2'-O-methoxyethyl modified nucleotide with phosphorothioate linkage
  modified_base 18: mod_base = OTHER; note = 2'-O-methoxyethyl modified thymine with phosphorothioate linkage
  modified_base 19: mod_base = OTHER; note = 2'-O-methoxyethyl modified nucleotide with phosphorothioate linkage
  modified_base 20: mod_base = OTHER; note = 2'-O-methoxyethyl 5-methylcytosine
  modified_base 21: mod_base = OTHER; note = Nucleotide with phosphorothioate linkage
  modified_base 22: mod_base = OTHER; note = Nucleotide with phosphorothioate linkage
  misc_feature 1..5: note = RNA
  misc_feature 6..15: note = DNA
  misc_feature 16..23: note = RNA
gcagaggtgaagcgaagtgcttg

SEQ ID NO: 66 - DNA, 23 bp, synthetic construct
  source 1..23: mol_type = other DNA
  modified_base 1: mod_base = OTHER; note = 2'-O-methoxyethyl modified nucleotide with phosphorothioate linkage
  modified_base 2: mod_base = OTHER; note = 2'-O-methoxyethyl 5-methylcytosine with phosphorothioate linkage
  modified_base 3: mod_base = OTHER; note = 2'-O-methoxyethyl modified nucleotide with phosphorothioate linkage
  modified_base 4: mod_base = OTHER; note = 2'-O-methoxyethyl modified nucleotide with phosphorothioate linkage
  modified_base 5: mod_base = OTHER; note = 2'-O-methoxyethyl modified nucleotide with phosphorothioate linkage
  modified_base 6: mod_base = OTHER; note = Nucleotide with phosphorothioate linkage
  modified_base 7: mod_base = OTHER; note = Nucleotide with phosphorothioate linkage
  modified_base 8: mod_base = OTHER; note = Thymine with phosphorothioate linkage
  modified_base 9: mod_base = OTHER; note = Nucleotide with phosphorothioate linkage
  modified_base 10: mod_base = OTHER; note = Nucleotide with phosphorothioate linkage
  modified_base 11: mod_base = OTHER; note = Nucleotide with phosphorothioate linkage
  modified_base 12: mod_base = OTHER; note = Nucleotide with phosphorothioate linkage
  modified_base 13: mod_base = OTHER; note = 5-methylcytosine with phosphorothioate linkage
  modified_base 14: mod_base = OTHER; note = Nucleotide with phosphorothioate linkage
  modified_base 15: mod_base = OTHER; note = Nucleotide with phosphorothioate linkage
  modified_base 16: mod_base = OTHER; note = 2'-O-methoxyethyl modified nucleotide with phosphorothioate linkage
  modified_base 17: mod_base = OTHER; note = 2'-O-methoxyethyl modified nucleotide with phosphorothioate linkage
  modified_base 18: mod_base = OTHER; note = 2'-O-methoxyethyl modified thymine with phosphorothioate linkage
  modified_base 19: mod_base = OTHER; note = 2'-O-methoxyethyl modified nucleotide with phosphorothioate linkage
  modified_base 20: mod_base = OTHER; note = 2'-O-methoxyethyl 5-methylcytosine
  modified_base 21: mod_base = OTHER; note = Nucleotide with phosphorothioate linkage
  modified_base 22: mod_base = OTHER; note = Nucleotide with phosphorothioate linkage
  misc_feature 1..5: note = RNA
  misc_feature 6..15: note = DNA
  misc_feature 16..23: note = RNA
gcagaggtgaagcgaagtgctgt

SEQ ID NO: 67 - DNA, 20 bp, synthetic construct
  source 1..20: mol_type = other DNA
  modified_base 1: mod_base = OTHER; note = 2'-O-methoxyethyl modified nucleotide with phosphorothioate linkage
  modified_base 2: mod_base = OTHER; note = 2'-O-methoxyethyl 5-methylcytosine with phosphorothioate linkage
  modified_base 3: mod_base = OTHER; note = 2'-O-methoxyethyl modified nucleotide with phosphorothioate linkage
  modified_base 4: mod_base = OTHER; note = 2'-O-methoxyethyl modified nucleotide with phosphorothioate linkage
  modified_base 5: mod_base = OTHER; note = 2'-O-methoxyethyl modified nucleotide with phosphorothioate linkage
  modified_base 6: mod_base = OTHER; note = Nucleotide with phosphorothioate linkage
  modified_base 7: mod_base = OTHER; note = Nucleotide with phosphorothioate linkage
  modified_base 8: mod_base = OTHER; note = Thymine with phosphorothioate linkage
  modified_base 9: mod_base = OTHER; note = Nucleotide with phosphorothioate linkage
  modified_base 10: mod_base = OTHER; note = Nucleotide with phosphorothioate linkage
  modified_base 11: mod_base = OTHER; note = Nucleotide with phosphorothioate linkage
  modified_base 12: mod_base = OTHER; note = Nucleotide with phosphorothioate linkage
  modified_base 13: mod_base = OTHER; note = 5-methylcytosine with phosphorothioate linkage
  modified_base 14: mod_base = OTHER; note = Nucleotide with phosphorothioate linkage
  modified_base 15: mod_base = OTHER; note = Nucleotide with phosphorothioate linkage
  modified_base 16: mod_base = OTHER; note = 2'-O-methoxyethyl modified nucleotide with phosphorothioate linkage
  modified_base 17: mod_base = OTHER; note = 2'-O-methoxyethyl modified nucleotide with phosphorothioate linkage
  modified_base 18: mod_base = OTHER; note = Nucleotide with phosphorothioate linkage
  modified_base 19: mod_base = OTHER; note = 2'-O-methoxyethyl modified nucleotide with phosphorothioate linkage
  modified_base 20: mod_base = OTHER; note = 2'-O-methoxyethyl 5-methylcytosine
  misc_feature 1..5: note = RNA
  misc_feature 6..15: note = DNA
  misc_feature 16..20: note = RNA
gcagaggtgaagcgaagtgc

SEQ ID NO: 68 - DNA, 20 bp, synthetic construct
  source 1..20: mol_type = other DNA
  modified_base 1: mod_base = OTHER; note = 2'-O-methylcyclopropyl modified nucleotide with phosphorothioate linkage
  modified_base 2: mod_base = OTHER; note = 2'-O-methoxyethyl 5-methylcytosine with phosphorothioate linkage
  modified_base 3: mod_base = OTHER; note = 2'-O-methoxyethyl modified nucleotide with phosphorothioate linkage
  modified_base 4: mod_base = OTHER; note = 2'-O-methoxyethyl modified nucleotide with phosphorothioate linkage
  modified_base 5: mod_base = OTHER; note = 2'-O-methoxyethyl modified nucleotide with phosphorothioate linkage
  modified_base 6: mod_base = OTHER; note = Nucleotide with phosphorothioate linkage
  modified_base 7: mod_base = OTHER; note = Nucleotide with phosphorothioate linkage
  modified_base 8: mod_base = OTHER; note = Thymine with phosphorothioate linkage
  modified_base 9: mod_base = OTHER; note = Nucleotide with phosphorothioate linkage
  modified_base 10: mod_base = OTHER; note = Nucleotide with phosphorothioate linkage
  modified_base 11: mod_base = OTHER; note = Nucleotide with phosphorothioate linkage
  modified_base 12: mod_base = OTHER; note = Nucleotide with phosphorothioate linkage
  modified_base 13: mod_base = OTHER; note = 5-methylcytosine with phosphorothioate linkage
  modified_base 14: mod_base = OTHER; note = Nucleotide with phosphorothioate linkage
  modified_base 15: mod_base = OTHER; note = Nucleotide with phosphorothioate linkage
  modified_base 16: mod_base = OTHER; note = 2'-O-methoxyethyl modified nucleotide with phosphorothioate linkage
  modified_base 17: mod_base = OTHER; note = 2'-O-methoxyethyl modified nucleotide with phosphorothioate linkage
  modified_base 18: mod_base = OTHER; note = 2'-O-methoxyethyl modified thymine with phosphorothioate linkage
  modified_base 19: mod_base = OTHER; note = 2'-O-methoxyethyl modified nucleotide with phosphorothioate linkage
  modified_base 20: mod_base = OTHER; note = 2'-O-methoxyethyl 5-methylcytosine
  misc_feature 1..5: note = RNA
  misc_feature 6..15: note = DNA
  misc_feature 16..20: note = RNA
gcagaggtgaagcgaagtgc

SEQ ID NO: 69 - DNA, 20 bp, synthetic construct
  source 1..20: mol_type = other DNA
  modified_base 1: mod_base = OTHER; note = 2'-O-methoxyethyl modified nucleotide with phosphorothioate linkage
  modified_base 2: mod_base = OTHER; note = 2'-O-methylcyclopropyl modified nucleotide with phosphorothioate linkage
  modified_base 3: mod_base = OTHER; note = 2'-O-methoxyethyl modified nucleotide with phosphorothioate linkage
  modified_base 4: mod_base = OTHER; note = 2'-O-methoxyethyl modified nucleotide with phosphorothioate linkage
  modified_base 5: mod_base = OTHER; note = 2'-O-methoxyethyl modified nucleotide with phosphorothioate linkage
  modified_base 6: mod_base = OTHER; note = Nucleotide with phosphorothioate linkage
  modified_base 7: mod_base = OTHER; note = Nucleotide with phosphorothioate linkage
  modified_base 8: mod_base = OTHER; note = Thymine with phosphorothioate linkage
  modified_base 9: mod_base = OTHER; note = Nucleotide with phosphorothioate linkage
  modified_base 10: mod_base = OTHER; note = Nucleotide with phosphorothioate linkage
  modified_base 11: mod_base = OTHER; note = Nucleotide with phosphorothioate linkage
  modified_base 12: mod_base = OTHER; note = Nucleotide with phosphorothioate linkage
  modified_base 13: mod_base = OTHER; note = 5-methylcytosine with phosphorothioate linkage
  modified_base 14: mod_base = OTHER; note = Nucleotide with phosphorothioate linkage
  modified_base 15: mod_base = OTHER; note = Nucleotide with phosphorothioate linkage
  modified_base 16: mod_base = OTHER; note = 2'-O-methoxyethyl modified nucleotide with phosphorothioate linkage
  modified_base 17: mod_base = OTHER; note = 2'-O-methoxyethyl modified nucleotide with phosphorothioate linkage
  modified_base 18: mod_base = OTHER; note = 2'-O-methoxyethyl modified thymine with phosphorothioate linkage
  modified_base 19: mod_base = OTHER; note = 2'-O-methoxyethyl modified nucleotide with phosphorothioate linkage
  modified_base 20: mod_base = OTHER; note = 2'-O-methoxyethyl 5-methylcytosine
  misc_feature 1..5: note = RNA
  misc_feature 6..15: note = DNA
  misc_feature 16..20: note = RNA
gcagaggtgaagcgaagtgc

SEQ ID NO: 70 - DNA, 20 bp, synthetic construct
  source 1..20: mol_type = other DNA
  modified_base 1: mod_base = OTHER; note = 2'-O-methoxyethyl modified nucleotide with phosphorothioate linkage
  modified_base 2: mod_base = OTHER; note = 2'-O-methoxyethyl 5-methylcytosine with phosphorothioate linkage
  modified_base 3: mod_base = OTHER; note = 2'-O-methylcyclopropyl modified nucleotide with phosphorothioate linkage
  modified_base 4: mod_base = OTHER; note = 2'-O-methoxyethyl modified nucleotide with phosphorothioate linkage
  modified_base 5: mod_base = OTHER; note = 2'-O-methoxyethyl modified nucleotide with phosphorothioate linkage
  modified_base 6: mod_base = OTHER; note = Nucleotide with phosphorothioate linkage
  modified_base 7: mod_base = OTHER; note = Nucleotide with phosphorothioate linkage
  modified_base 8: mod_base = OTHER; note = Thymine with phosphorothioate linkage
  modified_base 9: mod_base = OTHER; note = Nucleotide with phosphorothioate linkage
  modified_base 10: mod_base = OTHER; note = Nucleotide with phosphorothioate linkage
  modified_base 11: mod_base = OTHER; note = Nucleotide with phosphorothioate linkage
  modified_base 12: mod_base = OTHER; note = Nucleotide with phosphorothioate linkage
  modified_base 13: mod_base = OTHER; note = 5-methylcytosine with phosphorothioate linkage
  modified_base 14: mod_base = OTHER; note = Nucleotide with phosphorothioate linkage
  modified_base 15: mod_base = OTHER; note = Nucleotide with phosphorothioate linkage
  modified_base 16: mod_base = OTHER; note = 2'-O-methoxyethyl modified nucleotide with phosphorothioate linkage
  modified_base 17: mod_base = OTHER; note = 2'-O-methoxyethyl modified nucleotide with phosphorothioate linkage
  modified_base 18: mod_base = OTHER; note = 2'-O-methoxyethyl modified thymine with phosphorothioate linkage
  modified_base 19: mod_base = OTHER; note = 2'-O-methoxyethyl modified nucleotide with phosphorothioate linkage
  modified_base 20: mod_base = OTHER; note = 2'-O-methoxyethyl 5-methylcytosine
  misc_feature 1..5: note = RNA
  misc_feature 6..15: note = DNA
  misc_feature 16..20: note = RNA
gcagaggtgaagcgaagtgc

SEQ ID NO: 71 - DNA, 20 bp, synthetic construct
  source 1..20: mol_type = other DNA
  modified_base 1: mod_base = OTHER; note = 2'-O-methoxyethyl modified nucleotide with phosphorothioate linkage
  modified_base 2: mod_base = OTHER; note = 2'-O-methoxyethyl 5-methylcytosine with phosphorothioate linkage
  modified_base 3: mod_base = OTHER; note = 2'-O-methoxyethyl modified nucleotide with phosphorothioate linkage
  modified_base 4: mod_base = OTHER; note = 2'-O-methylcyclopropyl modified nucleotide with phosphorothioate linkage
  modified_base 5: mod_base = OTHER; note = 2'-O-methoxyethyl modified nucleotide with phosphorothioate linkage
  modified_base 6: mod_base = OTHER; note = Nucleotide with phosphorothioate linkage
  modified_base 7: mod_base = OTHER; note = Nucleotide with phosphorothioate linkage
  modified_base 8: mod_base = OTHER; note = Thymine with phosphorothioate linkage
  modified_base 9: mod_base = OTHER; note = Nucleotide with phosphorothioate linkage
  modified_base 10: mod_base = OTHER; note = Nucleotide with phosphorothioate linkage
  modified_base 11: mod_base = OTHER; note = Nucleotide with phosphorothioate linkage
  modified_base 12: mod_base = OTHER; note = Nucleotide with phosphorothioate linkage
  modified_base 13: mod_base = OTHER; note = 5-methylcytosine with phosphorothioate linkage
  modified_base 14: mod_base = OTHER; note = Nucleotide with phosphorothioate linkage
  modified_base 15: mod_base = OTHER; note = Nucleotide with phosphorothioate linkage
  modified_base 16: mod_base = OTHER; note = 2'-O-methoxyethyl modified nucleotide with phosphorothioate linkage
  modified_base 17: mod_base = OTHER; note = 2'-O-methoxyethyl modified nucleotide with phosphorothioate linkage
  modified_base 18: mod_base = OTHER; note = 2'-O-methoxyethyl modified thymine with phosphorothioate linkage
  modified_base 19: mod_base = OTHER; note = 2'-O-methoxyethyl modified nucleotide with phosphorothioate linkage
  modified_base 20: mod_base = OTHER; note = 2'-O-methoxyethyl 5-methylcytosine
  misc_feature 1..5: note = RNA
  misc_feature 6..15: note = DNA
  misc_feature 16..20: note = RNA
gcagaggtgaagcgaagtgc

SEQ ID NO: 72 - DNA, 20 bp, synthetic construct
  source 1..20: mol_type = other DNA
  modified_base 1: mod_base = OTHER; note = 2'-O-methoxyethyl modified nucleotide with phosphorothioate linkage
  modified_base 2: mod_base = OTHER; note = 2'-O-methoxyethyl 5-methylcytosine with phosphorothioate linkage
  modified_base 3: mod_base = OTHER; note = 2'-O-methoxyethyl modified nucleotide with phosphorothioate linkage
  modified_base 4: mod_base = OTHER; note = 2'-O-methoxyethyl modified nucleotide with phosphorothioate linkage
  modified_base 5: mod_base = OTHER; note = 2'-O-methylcyclopropyl modified nucleotide with phosphorothioate linkage
  modified_base 6: mod_base = OTHER; note = Nucleotide with phosphorothioate linkage
  modified_base 7: mod_base = OTHER; note = Nucleotide with phosphorothioate linkage
  modified_base 8: mod_base = OTHER; note = Thymine with phosphorothioate linkage
  modified_base 9: mod_base = OTHER; note = Nucleotide with phosphorothioate linkage
  modified_base 10: mod_base = OTHER; note = Nucleotide with phosphorothioate linkage
  modified_base 11: mod_base = OTHER; note = Nucleotide with phosphorothioate linkage
  modified_base 12: mod_base = OTHER; note = Nucleotide with phosphorothioate linkage
  modified_base 13: mod_base = OTHER; note = 5-methylcytosine with phosphorothioate linkage
  modified_base 14: mod_base = OTHER; note = Nucleotide with phosphorothioate linkage
  modified_base 15: mod_base = OTHER; note = Nucleotide with phosphorothioate linkage
  modified_base 16: mod_base = OTHER; note = 2'-O-methoxyethyl modified nucleotide with phosphorothioate linkage
  modified_base 17: mod_base = OTHER; note = 2'-O-methoxyethyl modified nucleotide with phosphorothioate linkage
  modified_base 18: mod_base = OTHER; note = 2'-O-methoxyethyl modified thymine with phosphorothioate linkage
  modified_base 19: mod_base = OTHER; note = 2'-O-methoxyethyl modified nucleotide with phosphorothioate linkage
  modified_base 20: mod_base = OTHER; note = 2'-O-methoxyethyl 5-methylcytosine
  misc_feature 1..5: note = RNA
  misc_feature 6..15: note = DNA
  misc_feature 16..20: note = RNA
gcagaggtgaagcgaagtgc

SEQ ID NO: 73 - DNA, 20 bp, synthetic construct
  source 1..20: mol_type = other DNA
  modified_base 1: mod_base = OTHER; note = 2'-O-methoxyethyl modified nucleotide with phosphorothioate linkage
  modified_base 2: mod_base = OTHER; note = 2'-O-methoxyethyl 5-methylcytosine with phosphorothioate linkage
  modified_base 3: mod_base = OTHER; note = 2'-O-methoxyethyl modified nucleotide with phosphorothioate linkage
  modified_base 4: mod_base = OTHER; note = 2'-O-methoxyethyl modified nucleotide with phosphorothioate linkage
  modified_base 5: mod_base = OTHER; note = 2'-O-methoxyethyl modified nucleotide with phosphorothioate linkage
  modified_base 6: mod_base = OTHER; note = Nucleotide with phosphorothioate linkage
  modified_base 7: mod_base = OTHER; note = Nucleotide with phosphorothioate linkage
  modified_base 8: mod_base = OTHER; note = Thymine with phosphorothioate linkage
  modified_base 9: mod_base = OTHER; note = Nucleotide with phosphorothioate linkage
  modified_base 10: mod_base = OTHER; note = Nucleotide with phosphorothioate linkage
  modified_base 11: mod_base = OTHER; note = Nucleotide with phosphorothioate linkage
  modified_base 12: mod_base = OTHER; note = Nucleotide with phosphorothioate linkage
  modified_base 13: mod_base = OTHER; note = 5-methylcytosine with phosphorothioate linkage
  modified_base 14: mod_base = OTHER; note = Nucleotide with phosphorothioate linkage
  modified_base 15: mod_base = OTHER; note = Nucleotide with phosphorothioate linkage
  modified_base 16: mod_base = OTHER; note = 2'-O-methylcyclopropyl modified nucleotide with phosphorothioate linkage
  modified_base 17: mod_base = OTHER; note = 2'-O-methoxyethyl modified nucleotide with phosphorothioate linkage
  modified_base 18: mod_base = OTHER; note = 2'-O-methoxyethyl modified thymine with phosphorothioate linkage
  modified_base 19: mod_base = OTHER; note = 2'-O-methoxyethyl modified nucleotide with phosphorothioate linkage
  modified_base 20: mod_base = OTHER; note = 2'-O-methoxyethyl 5-methylcytosine
  misc_feature 1..5: note = RNA
  misc_feature 6..15: note = DNA
  misc_feature 16..20: note = RNA
gcagaggtgaagcgaagtgc

SEQ ID NO: 74 - DNA, 20 bp, synthetic construct
  source 1..20: mol_type = other DNA
  modified_base 1: mod_base = OTHER; note = 2'-O-methoxyethyl modified nucleotide with phosphorothioate linkage
  modified_base 2: mod_base = OTHER; note = 2'-O-methoxyethyl 5-methylcytosine with phosphorothioate linkage
  modified_base 3: mod_base = OTHER; note = 2'-O-methoxyethyl modified nucleotide with phosphorothioate linkage
  modified_base 4: mod_base = OTHER; note = 2'-O-methoxyethyl modified nucleotide with phosphorothioate linkage
  modified_base 5: mod_base = OTHER; note = 2'-O-methoxyethyl modified nucleotide with phosphorothioate linkage
  modified_base 6: mod_base = OTHER; note = Nucleotide with phosphorothioate linkage
  modified_base 7: mod_base = OTHER; note = Nucleotide with phosphorothioate linkage
  modified_base 8: mod_base = OTHER; note = Thymine with phosphorothioate linkage
  modified_base 9: mod_base = OTHER; note = Nucleotide with phosphorothioate linkage
  modified_base 10: mod_base = OTHER; note = Nucleotide with phosphorothioate linkage
  modified_base 11: mod_base = OTHER; note = Nucleotide with phosphorothioate linkage
  modified_base 12: mod_base = OTHER; note = Nucleotide with phosphorothioate linkage
  modified_base 13: mod_base = OTHER; note = 5-methylcytosine with phosphorothioate linkage
  modified_base 14: mod_base = OTHER; note = Nucleotide with phosphorothioate linkage
  modified_base 15: mod_base = OTHER; note = Nucleotide with phosphorothioate linkage
  modified_base 16: mod_base = OTHER; note = 2'-O-methoxyethyl modified nucleotide with phosphorothioate linkage
  modified_base 17: mod_base = OTHER; note = 2'-O-methylcyclopropyl modified nucleotide with phosphorothioate linkage
  modified_base 18: mod_base = OTHER; note = 2'-O-methoxyethyl modified thymine with phosphorothioate linkage
  modified_base 19: mod_base = OTHER; note = 2'-O-methoxyethyl modified nucleotide with phosphorothioate linkage
  modified_base 20: mod_base = OTHER; note = 2'-O-methoxyethyl 5-methylcytosine
  misc_feature 1..5: note = RNA
  misc_feature 6..15: note = DNA
  misc_feature 16..20: note = RNA
gcagaggtgaagcgaagtgc

SEQ ID NO: 75 - DNA, 20 bp, synthetic construct
  source 1..20: mol_type = other DNA
  modified_base 1: mod_base = OTHER; note = 2'-O-methoxyethyl modified nucleotide with phosphorothioate linkage
  modified_base 2: mod_base = OTHER; note = 2'-O-methoxyethyl 5-methylcytosine with phosphorothioate linkage
  modified_base 3: mod_base = OTHER; note = 2'-O-methoxyethyl modified nucleotide with phosphorothioate linkage
  modified_base 4: mod_base = OTHER; note = 2'-O-methoxyethyl modified nucleotide with phosphorothioate linkage
  modified_base 5: mod_base = OTHER; note = 2'-O-methoxyethyl modified nucleotide with phosphorothioate linkage
  modified_base 6: mod_base = OTHER; note = Nucleotide with phosphorothioate linkage
  modified_base 7: mod_base = OTHER; note = Nucleotide with phosphorothioate linkage
  modified_base 8: mod_base = OTHER; note = Thymine with phosphorothioate linkage
  modified_base 9: mod_base = OTHER; note = Nucleotide with phosphorothioate linkage
  modified_base 10: mod_base = OTHER; note = Nucleotide with phosphorothioate linkage
  modified_base 11: mod_base = OTHER; note = Nucleotide with phosphorothioate linkage
  modified_base 12: mod_base = OTHER; note = Nucleotide with phosphorothioate linkage
  modified_base 13: mod_base = OTHER; note = 5-methylcytosine with phosphorothioate linkage
  modified_base 14: mod_base = OTHER; note = Nucleotide with phosphorothioate linkage
  modified_base 15: mod_base = OTHER; note = Nucleotide with phosphorothioate linkage
  modified_base 16: mod_base = OTHER; note = 2'-O-methoxyethyl modified nucleotide with phosphorothioate linkage
  modified_base 17: mod_base = OTHER; note = 2'-O-methoxyethyl modified nucleotide with phosphorothioate linkage
  modified_base 18: mod_base = OTHER; note = 2'-O-methylcyclopropyl modified nucleotide with phosphorothioate linkage
  modified_base 19: mod_base = OTHER; note = 2'-O-methoxyethyl modified nucleotide with phosphorothioate linkage
  modified_base 20: mod_base = OTHER; note = 2'-O-methoxyethyl 5-methylcytosine
  misc_feature 1..5: note = RNA
  misc_feature 6..15: note = DNA
  misc_feature 16..20: note = RNA
gcagaggtgaagcgaagtgc

SEQ ID NO: 76 - DNA, 20 bp, synthetic construct
  source 1..20: mol_type = other DNA
  modified_base 1: mod_base = OTHER; note = 2'-O-methoxyethyl modified nucleotide with phosphorothioate linkage
  modified_base 2: mod_base = OTHER; note = 2'-O-methoxyethyl 5-methylcytosine with phosphorothioate linkage
  modified_base 3: mod_base = OTHER; note = 2'-O-methoxyethyl modified nucleotide with phosphorothioate linkage
  modified_base 4: mod_base = OTHER; note = 2'-O-methoxyethyl modified nucleotide with phosphorothioate linkage
  modified_base 5: mod_base = OTHER; note = 2'-O-methoxyethyl modified nucleotide with phosphorothioate linkage
  modified_base 6: mod_base = OTHER; note = Nucleotide with phosphorothioate linkage
  modified_base 7: mod_base = OTHER; note = Nucleotide with phosphorothioate linkage
  modified_base 8: mod_base = OTHER; note = Thymine with phosphorothioate linkage
  modified_base 9: mod_base = OTHER; note = Nucleotide with phosphorothioate linkage
  modified_base 10: mod_base = OTHER; note = Nucleotide with phosphorothioate linkage
  modified_base 11: mod_base = OTHER; note = Nucleotide with phosphorothioate linkage
  modified_base 12: mod_base = OTHER; note = Nucleotide with phosphorothioate linkage
  modified_base 13: mod_base = OTHER; note = 5-methylcytosine with phosphorothioate linkage
  modified_base 14: mod_base = OTHER; note = Nucleotide with phosphorothioate linkage
  modified_base 15: mod_base = OTHER; note = Nucleotide with phosphorothioate linkage
  modified_base 16: mod_base = OTHER; note = 2'-O-methoxyethyl modified nucleotide with phosphorothioate linkage
  modified_base 17: mod_base = OTHER; note = 2'-O-methoxyethyl modified nucleotide with phosphorothioate linkage
  modified_base 18: mod_base = OTHER; note = 2'-O-methoxyethyl modified thymine with phosphorothioate linkage
  modified_base 19: mod_base = OTHER; note = 2'-O-methylcyclopropyl modified nucleotide with phosphorothioate linkage
  modified_base 20: mod_base = OTHER; note = 2'-O-methoxyethyl 5-methylcytosine
  misc_feature 1..5: note = RNA
  misc_feature 6..15: note = DNA
  misc_feature 16..20: note = RNA
gcagaggtgaagcgaagtgc

SEQ ID NO: 77 - DNA, 20 bp, synthetic construct
  source 1..20: mol_type = other DNA
  modified_base 1: mod_base = OTHER; note = 2'-O-methoxyethyl modified nucleotide with phosphorothioate linkage
  modified_base 2: mod_base = OTHER; note = 2'-O-methoxyethyl 5-methylcytosine with phosphorothioate linkage
  modified_base 3: mod_base = OTHER; note = 2'-O-methoxyethyl modified nucleotide with phosphorothioate linkage
  modified_base 4: mod_base = OTHER; note = 2'-O-methoxyethyl modified nucleotide with phosphorothioate linkage
  modified_base 5: mod_base = OTHER; note = 2'-O-methoxyethyl modified nucleotide with phosphorothioate linkage
  modified_base 6: mod_base = OTHER; note = Nucleotide with phosphorothioate linkage
  modified_base 7: mod_base = OTHER; note = Nucleotide with phosphorothioate linkage
  modified_base 8: mod_base = OTHER; note = Thymine with phosphorothioate linkage
  modified_base 9: mod_base = OTHER; note = Nucleotide with phosphorothioate linkage
  modified_base 10: mod_base = OTHER; note = Nucleotide with phosphorothioate linkage
  modified_base 11: mod_base = OTHER; note = Nucleotide with phosphorothioate linkage
  modified_base 12: mod_base = OTHER; note = Nucleotide with phosphorothioate linkage
  modified_base 13: mod_base = OTHER; note = 5-methylcytosine with phosphorothioate linkage
  modified_base 14: mod_base = OTHER; note = Nucleotide with phosphorothioate linkage
  modified_base 15: mod_base = OTHER; note = Nucleotide with phosphorothioate linkage
  modified_base 16: mod_base = OTHER; note = 2'-O-methoxyethyl modified nucleotide with phosphorothioate linkage
  modified_base 17: mod_base = OTHER; note = 2'-O-methoxyethyl modified nucleotide with phosphorothioate linkage
  modified_base 18: mod_base = OTHER; note = 2'-O-methoxyethyl modified thymine with phosphorothioate linkage
  modified_base 19: mod_base = OTHER; note = 2'-O-methoxyethyl modified nucleotide with phosphorothioate linkage
  modified_base 20: mod_base = OTHER; note = 2'-O-methylcyclopropyl modified nucleotide
  misc_feature 1..5: note = RNA
  misc_feature 6..15: note = DNA
  misc_feature 16..20: note = RNA
gcagaggtgaagcgaagtgc

SEQ ID NO: 78 - DNA, 20 bp, synthetic construct
  source 1..20: mol_type = other DNA
  modified_base 1: mod_base = OTHER; note = 2'-O-methyl modified nucleotide with phosphorothioate linkage
  modified_base 2: mod_base = OTHER; note = 2'-O-methoxyethyl 5-methylcytosine with phosphorothioate linkage
  modified_base 3: mod_base = OTHER; note = 2'-O-methoxyethyl modified nucleotide with phosphorothioate linkage
  modified_base 4: mod_base = OTHER; note = 2'-O-methoxyethyl modified nucleotide with phosphorothioate linkage
  modified_base 5: mod_base = OTHER; note = 2'-O-methoxyethyl modified nucleotide with phosphorothioate linkage
  modified_base 6: mod_base = OTHER; note = Nucleotide with phosphorothioate linkage
  modified_base 7: mod_base = OTHER; note = Nucleotide with phosphorothioate linkage
  modified_base 8: mod_base = OTHER; note = Thymine with phosphorothioate linkage
  modified_base 9: mod_base = OTHER; note = Nucleotide with phosphorothioate linkage
  modified_base 10: mod_base = OTHER; note = Nucleotide with phosphorothioate linkage
  modified_base 11: mod_base = OTHER; note = Nucleotide with phosphorothioate linkage
  modified_base 12: mod_base = OTHER; note = Nucleotide with phosphorothioate linkage
  modified_base 13: mod_base = OTHER; note = 5-methylcytosine with phosphorothioate linkage
  modified_base 14: mod_base = OTHER; note = Nucleotide with phosphorothioate linkage
  modified_base 15: mod_base = OTHER; note = Nucleotide with phosphorothioate linkage
  modified_base 16: mod_base = OTHER; note = 2'-O-methoxyethyl modified nucleotide with phosphorothioate linkage
  modified_base 17: mod_base = OTHER; note = 2'-O-methoxyethyl modified nucleotide with phosphorothioate linkage
  modified_base 18: mod_base = OTHER; note = 2'-O-methoxyethyl modified thymine with phosphorothioate linkage
  modified_base 19: mod_base = OTHER; note = 2'-O-methoxyethyl modified nucleotide with phosphorothioate linkage
  modified_base 20: mod_base = OTHER; note = 2'-O-methoxyethyl 5-methylcytosine
  misc_feature 1..5: note = RNA
  misc_feature 6..15: note = DNA
  misc_feature 16..20: note = RNA
gcagaggtgaagcgaagtgc

SEQ ID NO: 79 - DNA, 20 bp, synthetic construct
  source 1..20: mol_type = other DNA
  modified_base 1: mod_base = OTHER; note = 2'-O-methoxyethyl modified nucleotide with phosphorothioate linkage
  modified_base 2: mod_base = OTHER; note = 2'-O-methyl 5-methylcytosine with phosphorothioate linkage
  modified_base 3: mod_base = OTHER; note = 2'-O-methoxyethyl modified nucleotide with phosphorothioate linkage
  modified_base 4: mod_base = OTHER; note = 2'-O-methoxyethyl modified nucleotide with phosphorothioate linkage
  modified_base 5: mod_base = OTHER; note = 2'-O-methoxyethyl modified nucleotide with phosphorothioate linkage
  modified_base 6: mod_base = OTHER; note = Nucleotide with phosphorothioate linkage
  modified_base 7: mod_base = OTHER; note = Nucleotide with phosphorothioate linkage
  modified_base 8: mod_base = OTHER; note = Thymine with phosphorothioate linkage
  modified_base 9: mod_base = OTHER; note = Nucleotide with phosphorothioate linkage
  modified_base 10: mod_base = OTHER; note = Nucleotide with phosphorothioate linkage
  modified_base 11: mod_base = OTHER; note = Nucleotide with phosphorothioate linkage
  modified_base 12: mod_base = OTHER; note = Nucleotide with phosphorothioate linkage
  modified_base 13: mod_base = OTHER; note = 5-methylcytosine with phosphorothioate linkage
  modified_base 14: mod_base = OTHER; note = Nucleotide with phosphorothioate linkage
  modified_base 15: mod_base = OTHER; note = Nucleotide with phosphorothioate linkage
  modified_base 16: mod_base = OTHER; note = 2'-O-methoxyethyl modified nucleotide with phosphorothioate linkage
  modified_base 17: mod_base = OTHER; note = 2'-O-methoxyethyl modified nucleotide with phosphorothioate linkage
  modified_base 18: mod_base = OTHER; note = 2'-O-methoxyethyl modified thymine with phosphorothioate linkage
  modified_base 19: mod_base = OTHER; note = 2'-O-methoxyethyl modified nucleotide with phosphorothioate linkage
  modified_base 20: mod_base = OTHER; note = 2'-O-methoxyethyl 5-methylcytosine
  misc_feature 1..5: note = RNA
  misc_feature 6..15: note = DNA
  misc_feature 16..20: note = RNA
gcagaggtgaagcgaagtgc

SEQ ID NO: 80 - DNA, 20 bp, synthetic construct
  source 1..20: mol_type = other DNA
  modified_base 1: mod_base = OTHER; note = 2'-O-methoxyethyl modified nucleotide with phosphorothioate linkage
  modified_base 2: mod_base = OTHER; note = 2'-O-methoxyethyl 5-methylcytosine with phosphorothioate linkage
  modified_base 3: mod_base = OTHER; note = 2'-O-methyl modified nucleotide with phosphorothioate linkage
  modified_base 4: mod_base = OTHER; note = 2'-O-methoxyethyl modified nucleotide with phosphorothioate linkage
  modified_base 5: mod_base = OTHER; note = 2'-O-methoxyethyl modified nucleotide with phosphorothioate linkage
  modified_base 6: mod_base = OTHER; note = Nucleotide with phosphorothioate linkage
  modified_base 7: mod_base = OTHER; note = Nucleotide with phosphorothioate linkage
  modified_base 8: mod_base = OTHER; note = Thymine with phosphorothioate linkage
  modified_base 9: mod_base = OTHER; note = Nucleotide with phosphorothioate linkage
  modified_base 10: mod_base = OTHER; note = Nucleotide with phosphorothioate linkage
  modified_base 11: mod_base = OTHER; note = Nucleotide with phosphorothioate linkage
  modified_base 12: mod_base = OTHER; note = Nucleotide with phosphorothioate linkage
  modified_base 13: mod_base = OTHER; note = 5-methylcytosine with phosphorothioate linkage
  modified_base 14: mod_base = OTHER; note = Nucleotide with phosphorothioate linkage
  modified_base 15: mod_base = OTHER; note = Nucleotide with phosphorothioate linkage
  modified_base 16: mod_base = OTHER; note = 2'-O-methoxyethyl modified nucleotide with phosphorothioate linkage
  modified_base 17: mod_base = OTHER; note = 2'-O-methoxyethyl modified nucleotide with phosphorothioate linkage
  modified_base 18: mod_base = OTHER; note = 2'-O-methoxyethyl modified thymine with phosphorothioate linkage
  modified_base 19: mod_base = OTHER; note = 2'-O-methoxyethyl modified nucleotide with phosphorothioate linkage
  modified_base 20: mod_base = OTHER; note = 2'-O-methoxyethyl 5-methylcytosine
  misc_feature 1..5: note = RNA
  misc_feature 6..15: note = DNA
  misc_feature 16..20: note = RNA
gcagaggtgaagcgaagtgc

SEQ ID NO: 81 - DNA, 20 bp, synthetic construct
  source 1..20: mol_type = other DNA
  modified_base 1: mod_base = OTHER; note = 2'-O-methoxyethyl modified nucleotide with phosphorothioate linkage
  modified_base 2: mod_base = OTHER; note = 2'-O-methoxyethyl 5-methylcytosine with phosphorothioate linkage
  modified_base 3: mod_base = OTHER; note = 2'-O-methoxyethyl modified nucleotide with phosphorothioate linkage
  modified_base 4: mod_base = OTHER; note = 2'-O-methyl modified nucleotide with phosphorothioate linkage
  modified_base 5: mod_base = OTHER; note = 2'-O-methoxyethyl modified nucleotide with phosphorothioate linkage
  modified_base 6: mod_base = OTHER; note = Nucleotide with phosphorothioate linkage
  modified_base 7: mod_base = OTHER; note = Nucleotide with phosphorothioate linkage
  modified_base 8: mod_base = OTHER; note = Thymine with phosphorothioate linkage
  modified_base 9: mod_base = OTHER; note = Nucleotide with phosphorothioate linkage
  modified_base 10: mod_base = OTHER; note = Nucleotide with phosphorothioate linkage
  modified_base 11: mod_base = OTHER; note = Nucleotide with phosphorothioate linkage
  modified_base 12: mod_base = OTHER; note = Nucleotide with phosphorothioate linkage
  modified_base 13: mod_base = OTHER; note = 5-methylcytosine with phosphorothioate linkage
  modified_base 14: mod_base = OTHER; note = Nucleotide with phosphorothioate linkage
  modified_base 15: mod_base = OTHER; note = Nucleotide with phosphorothioate linkage
  modified_base 16: mod_base = OTHER; note = 2'-O-methoxyethyl modified nucleotide with phosphorothioate linkage
  modified_base 17: mod_base = OTHER; note = 2'-O-methoxyethyl modified nucleotide with phosphorothioate linkage
  modified_base 18: mod_base = OTHER; note = 2'-O-methoxyethyl modified thymine with phosphorothioate linkage
  modified_base 19: mod_base = OTHER; note = 2'-O-methoxyethyl modified nucleotide with phosphorothioate linkage
  modified_base 20: mod_base = OTHER; note = 2'-O-methoxyethyl 5-methylcytosine
  misc_feature 1..5: note = RNA
  misc_feature 6..15: note = DNA
  misc_feature 16..20: note = RNA
gcagaggtgaagcgaagtgc

SEQ ID NO: 82 - DNA, 20 bp, synthetic construct
  source 1..20: mol_type = other DNA
  modified_base 1: mod_base = OTHER; note = 2'-O-methoxyethyl modified nucleotide with phosphorothioate linkage
  modified_base 2: mod_base = OTHER; note = 2'-O-methoxyethyl 5-methylcytosine with phosphorothioate linkage
  modified_base 3: mod_base = OTHER; note = 2'-O-methoxyethyl modified nucleotide with phosphorothioate linkage
  modified_base 4: mod_base = OTHER; note = 2'-O-methoxyethyl modified nucleotide with phosphorothioate linkage
  modified_base 5: mod_base = OTHER; note = 2'-O-methyl modified nucleotide with phosphorothioate linkage
  modified_base 6: mod_base = OTHER; note = Nucleotide with phosphorothioate linkage
  modified_base 7: mod_base = OTHER; note = Nucleotide with phosphorothioate linkage
  modified_base 8: mod_base = OTHER; note = Thymine with phosphorothioate linkage
  modified_base 9: mod_base = OTHER; note = Nucleotide with phosphorothioate linkage
  modified_base 10: mod_base = OTHER; note = Nucleotide with phosphorothioate linkage
  modified_base 11: mod_base = OTHER; note = Nucleotide with phosphorothioate linkage
  modified_base 12: mod_base = OTHER; note = Nucleotide with phosphorothioate linkage
  modified_base 13: mod_base = OTHER; note = 5-methylcytosine with phosphorothioate linkage
  modified_base 14: mod_base = OTHER; note = Nucleotide with phosphorothioate linkage
  modified_base 15: mod_base = OTHER; note = Nucleotide with phosphorothioate linkage
  modified_base 16: mod_base = OTHER; note = 2'-O-methoxyethyl modified nucleotide with phosphorothioate linkage
  modified_base 17: mod_base = OTHER; note = 2'-O-methoxyethyl modified nucleotide with phosphorothioate linkage
  modified_base 18: mod_base = OTHER; note = 2'-O-methoxyethyl modified thymine with phosphorothioate linkage
  modified_base 19: mod_base = OTHER; note = 2'-O-methoxyethyl modified nucleotide with phosphorothioate linkage
  modified_base 20: mod_base = OTHER; note = 2'-O-methoxyethyl 5-methylcytosine
  misc_feature 1..5: note = RNA
  misc_feature 6..15: note = DNA
  misc_feature 16..20: note = RNA
gcagaggtgaagcgaagtgc

SEQ ID NO: 83 - DNA, 20 bp, synthetic construct
  source 1..20: mol_type = other DNA
  modified_base 1: mod_base = OTHER; note = 2'-O-methoxyethyl modified nucleotide with phosphorothioate linkage
  modified_base 2: mod_base = OTHER; note = 2'-O-methoxyethyl 5-methylcytosine with phosphorothioate linkage
  modified_base 3: mod_base = OTHER; note = 2'-O-methoxyethyl modified nucleotide with phosphorothioate linkage
  modified_base 4: mod_base = OTHER; note = 2'-O-methoxyethyl modified nucleotide with phosphorothioate linkage
  modified_base 5: mod_base = OTHER; note = 2'-O-methoxyethyl modified nucleotide with phosphorothioate linkage
  modified_base 6: mod_base = OTHER; note = Nucleotide with phosphorothioate linkage
  modified_base 7: mod_base = OTHER; note = Nucleotide with phosphorothioate linkage
  modified_base 8: mod_base = OTHER; note = Thymine with phosphorothioate linkage
  modified_base 9: mod_base = OTHER; note = Nucleotide with phosphorothioate linkage
  modified_base 10: mod_base = OTHER; note = Nucleotide with phosphorothioate linkage
  modified_base 11: mod_base = OTHER; note = Nucleotide with phosphorothioate linkage
  modified_base 12: mod_base = OTHER; note = Nucleotide with phosphorothioate linkage
  modified_base 13: mod_base = OTHER; note = 5-methylcytosine with phosphorothioate linkage
  modified_base 14: mod_base = OTHER; note = Nucleotide with phosphorothioate linkage
  modified_base 15: mod_base = OTHER; note = Nucleotide with phosphorothioate linkage
  modified_base 16: mod_base = OTHER; note = 2'-O-methyl modified nucleotide with phosphorothioate linkage
  modified_base 17: mod_base = OTHER; note = 2'-O-methoxyethyl modified nucleotide with phosphorothioate linkage
  modified_base 18: mod_base = OTHER; note = 2'-O-methoxyethyl modified thymine with phosphorothioate linkage
  modified_base 19: mod_base = OTHER; note = 2'-O-methoxyethyl modified nucleotide with phosphorothioate linkage
  modified_base 20: mod_base = OTHER; note = 2'-O-methoxyethyl 5-methylcytosine
  misc_feature 1..5: note = RNA
  misc_feature 6..15: note = DNA
  misc_feature 16..20: note = RNA
gcagaggtgaagcgaagtgc

SEQ ID NO: 84 - DNA, 20 bp, synthetic construct
  source 1..20: mol_type = other DNA
  modified_base 1: mod_base = OTHER; note = 2'-O-methoxyethyl modified nucleotide with phosphorothioate linkage
  modified_base 2: mod_base = OTHER; note = 2'-O-methoxyethyl 5-methylcytosine with phosphorothioate linkage
  modified_base 3: mod_base = OTHER; note = 2'-O-methoxyethyl modified nucleotide with phosphorothioate linkage
  modified_base 4: mod_base = OTHER; note = 2'-O-methoxyethyl modified nucleotide with phosphorothioate linkage
  modified_base 5: mod_base = OTHER; note = 2'-O-methoxyethyl modified nucleotide with phosphorothioate linkage
  modified_base 6: mod_base = OTHER; note = Nucleotide with phosphorothioate linkage
  modified_base 7: mod_base = OTHER; note = Nucleotide with phosphorothioate linkage
  modified_base 8: mod_base = OTHER; note = Thymine with phosphorothioate linkage
  modified_base 9: mod_base = OTHER; note = Nucleotide with phosphorothioate linkage
  modified_base 10: mod_base = OTHER; note = Nucleotide with phosphorothioate linkage
  modified_base 11: mod_base = OTHER; note = Nucleotide with phosphorothioate linkage
  modified_base 12: mod_base = OTHER; note = Nucleotide with phosphorothioate linkage
  modified_base 13: mod_base = OTHER; note = 5-methylcytosine with phosphorothioate linkage
  modified_base 14: mod_base = OTHER; note = Nucleotide with phosphorothioate linkage
  modified_base 15: mod_base = OTHER; note = Nucleotide with phosphorothioate linkage
  modified_base 16: mod_base = OTHER; note = 2'-O-methoxyethyl modified nucleotide with phosphorothioate linkage
  modified_base 17: mod_base = OTHER; note = 2'-O-methyl modified nucleotide with phosphorothioate linkage
  modified_base 18: mod_base = OTHER; note = 2'-O-methoxyethyl modified thymine with phosphorothioate linkage
  modified_base 19: mod_base = OTHER; note = 2'-O-methoxyethyl modified nucleotide with phosphorothioate linkage
  modified_base 20: mod_base = OTHER; note = 2'-O-methoxyethyl 5-methylcytosine
  misc_feature 1..5: note = RNA
  misc_feature 6..15: note = DNA
  misc_feature 16..20: note = RNA
gcagaggtgaagcgaagtgc

SEQ ID NO: 85 - DNA, 20 bp, synthetic construct
  source 1..20: mol_type = other DNA
  modified_base 1: mod_base = OTHER; note = 2'-O-methoxyethyl modified nucleotide with phosphorothioate linkage
  modified_base 2: mod_base = OTHER; note = 2'-O-methoxyethyl 5-methylcytosine with phosphorothioate linkage
  modified_base 3: mod_base = OTHER; note = 2'-O-methoxyethyl modified nucleotide with phosphorothioate linkage
  modified_base 4: mod_base = OTHER; note = 2'-O-methoxyethyl modified nucleotide with phosphorothioate linkage
  modified_base 5: mod_base = OTHER; note = 2'-O-methoxyethyl modified nucleotide with phosphorothioate linkage
  modified_base 6: mod_base = OTHER; note = Nucleotide with phosphorothioate linkage
  modified_base 7: mod_base = OTHER; note = Nucleotide with phosphorothioate linkage
  modified_base 8: mod_base = OTHER; note = Thymine with phosphorothioate linkage
  modified_base 9: mod_base = OTHER; note = Nucleotide with phosphorothioate linkage
  modified_base 10: mod_base = OTHER; note = Nucleotide with phosphorothioate linkage
  modified_base 11: mod_base = OTHER; note = Nucleotide with phosphorothioate linkage
  modified_base 12: mod_base = OTHER; note = Nucleotide with phosphorothioate linkage
  modified_base 13: mod_base = OTHER; note = 5-methylcytosine with phosphorothioate linkage
  modified_base 14: mod_base = OTHER; note = Nucleotide with phosphorothioate linkage
  modified_base 15: mod_base = OTHER; note = Nucleotide with phosphorothioate linkage
  modified_base 16: mod_base = OTHER; note = 2'-O-methoxyethyl modified nucleotide with phosphorothioate linkage
  modified_base 17: mod_base = OTHER; note = 2'-O-methoxyethyl modified nucleotide with phosphorothioate linkage
  modified_base 18: mod_base = OTHER; note = 2'-O-methyl modified nucleotide with phosphorothioate linkage
  modified_base 19: mod_base = OTHER; note = 2'-O-methoxyethyl modified nucleotide with phosphorothioate linkage
  modified_base 20: mod_base = OTHER; note = 2'-O-methoxyethyl 5-methylcytosine
  misc_feature 1..5: note = RNA
  misc_feature 6..15: note = DNA
  misc_feature 16..20: note = RNA
gcagaggtgaagcgaagtgc

SEQ ID NO: 86 - DNA, 20 bp, synthetic construct
  source 1..20: mol_type = other DNA
  modified_base 1: mod_base = OTHER; note = 2'-O-methoxyethyl modified nucleotide with phosphorothioate linkage
  modified_base 2: mod_base = OTHER; note = 2'-O-methoxyethyl 5-methylcytosine with phosphorothioate linkage
  modified_base 3: mod_base = OTHER; note = 2'-O-methoxyethyl modified nucleotide with phosphorothioate linkage
  modified_base 4: mod_base = OTHER; note = 2'-O-methoxyethyl modified nucleotide with phosphorothioate linkage
  modified_base 5: mod_base = OTHER; note = 2'-O-methoxyethyl modified nucleotide with phosphorothioate linkage
  modified_base 6: mod_base = OTHER; note = Nucleotide with phosphorothioate linkage
  modified_base 7: mod_base = OTHER; note = Nucleotide with phosphorothioate linkage
  modified_base 8: mod_base = OTHER; note = Thymine with phosphorothioate linkage
  modified_base 9: mod_base = OTHER; note = Nucleotide with phosphorothioate linkage
  modified_base 10: mod_base = OTHER; note = Nucleotide with phosphorothioate linkage
  modified_base 11: mod_base = OTHER; note = Nucleotide with phosphorothioate linkage
  modified_base 12: mod_base = OTHER; note = Nucleotide with phosphorothioate linkage
  modified_base 13: mod_base = OTHER; note = 5-methylcytosine with phosphorothioate linkage
  modified_base 14: mod_base = OTHER; note = Nucleotide with phosphorothioate linkage
  modified_base 15: mod_base = OTHER; note = Nucleotide with phosphorothioate linkage
  modified_base 16: mod_base = OTHER; note = 2'-O-methoxyethyl modified nucleotide with phosphorothioate linkage
  modified_base 17: mod_base = OTHER; note = 2'-O-methoxyethyl modified nucleotide with phosphorothioate linkage
  modified_base 18: mod_base = OTHER; note = 2'-O-methoxyethyl modified thymine with phosphorothioate linkage
  modified_base 19: mod_base = OTHER; note = 2'-O-methyl modified nucleotide with phosphorothioate linkage
  modified_base 20: mod_base = OTHER; note = 2'-O-methoxyethyl 5-methylcytosine
  misc_feature 1..5: note = RNA
  misc_feature 6..15: note = DNA
  misc_feature 16..20: note = RNA
gcagaggtgaagcgaagtgc

SEQ ID NO: 87 - DNA, 20 bp, synthetic construct
  source 1..20: mol_type = other DNA
  modified_base 1: mod_base = OTHER; note = 2'-O-methoxyethyl modified nucleotide with phosphorothioate linkage
  modified_base 2: mod_base = OTHER; note = 2'-O-methoxyethyl 5-methylcytosine with phosphorothioate linkage
  modified_base 3: mod_base = OTHER; note = 2'-O-methoxyethyl modified nucleotide with phosphorothioate linkage
  modified_base 4: mod_base = OTHER; note = 2'-O-methoxyethyl modified nucleotide with phosphorothioate linkage
  modified_base 5: mod_base = OTHER; note = 2'-O-methoxyethyl modified nucleotide with phosphorothioate linkage
  modified_base 6: mod_base = OTHER; note = Nucleotide with phosphorothioate linkage
  modified_base 7: mod_base = OTHER; note = Nucleotide with phosphorothioate linkage
  modified_base 8: mod_base = OTHER; note = Thymine with phosphorothioate linkage
  modified_base 9: mod_base = OTHER; note = Nucleotide with phosphorothioate linkage
  modified_base 10: mod_base = OTHER; note = Nucleotide with phosphorothioate linkage
  modified_base 11: mod_base = OTHER; note = Nucleotide with phosphorothioate linkage
  modified_base 12: mod_base = OTHER; note = Nucleotide with phosphorothioate linkage
  modified_base 13: mod_base = OTHER; note = 5-methylcytosine with phosphorothioate linkage
  modified_base 14: mod_base = OTHER; note = Nucleotide with phosphorothioate linkage
  modified_base 15: mod_base = OTHER; note = Nucleotide with phosphorothioate linkage
  modified_base 16: mod_base = OTHER; note = 2'-O-methoxyethyl modified nucleotide with phosphorothioate linkage
  modified_base 17: mod_base = OTHER; note = 2'-O-methoxyethyl modified nucleotide with phosphorothioate linkage
  modified_base 18: mod_base = OTHER; note = 2'-O-methoxyethyl modified thymine with phosphorothioate linkage
  modified_base 19: mod_base = OTHER; note = 2'-O-methoxyethyl modified nucleotide with phosphorothioate linkage
  modified_base 20: mod_base = OTHER; note = 2'-O-methyl 5-methylcytosine
  misc_feature 1..5: note = RNA
  misc_feature 6..15: note = DNA
  misc_feature 16..20: note = RNA
gcagaggtgaagcgaagtgc

SEQ ID NO: 88 - DNA, 20 bp, synthetic construct
  source 1..20: mol_type = other DNA
  modified_base 1: mod_base = OTHER; note = 2'-O-methoxyethyl modified nucleotide with phosphorothioate linkage
  modified_base 2: mod_base = OTHER; note = 2'-O-methoxyethyl 5-methylcytosine with phosphorothioate linkage
  modified_base 3: mod_base = OTHER; note = 2'-O-methyl 2,6-diaminopurine with phosphorothioate linkage
  modified_base 4: mod_base = OTHER; note = 2'-O-methoxyethyl modified nucleotide with phosphorothioate linkage
  modified_base 5: mod_base = OTHER; note = 2'-O-methoxyethyl modified nucleotide with phosphorothioate linkage
  modified_base 6: mod_base = OTHER; note = Nucleotide with phosphorothioate linkage
  modified_base 7: mod_base = OTHER; note = Nucleotide with phosphorothioate linkage
  modified_base 8: mod_base = OTHER; note = Thymine with phosphorothioate linkage
  modified_base 9: mod_base = OTHER; note = Nucleotide with phosphorothioate linkage
  modified_base 10: mod_base = OTHER; note = Nucleotide with phosphorothioate linkage
  modified_base 11: mod_base = OTHER; note = Nucleotide with phosphorothioate linkage
  modified_base 12: mod_base = OTHER; note = Nucleotide with phosphorothioate linkage
  modified_base 13: mod_base = OTHER; note = 5-methylcytosine with phosphorothioate linkage
  modified_base 14: mod_base = OTHER; note = Nucleotide with phosphorothioate linkage
  modified_base 15: mod_base = OTHER; note = Nucleotide with phosphorothioate linkage
  modified_base 16: mod_base = OTHER; note = 2'-O-methoxyethyl modified nucleotide with phosphorothioate linkage
  modified_base 17: mod_base = OTHER; note = 2'-O-methoxyethyl modified nucleotide with phosphorothioate linkage
  modified_base 18: mod_base = OTHER; note = 2'-O-methoxyethyl modified thymine with phosphorothioate linkage
  modified_base 19: mod_base = OTHER; note = 2'-O-methoxyethyl modified nucleotide with phosphorothioate linkage
  modified_base 20: mod_base = OTHER; note = 2'-O-methoxyethyl 5-methylcytosine
  misc_feature 1..5: note = RNA
  misc_feature 6..15: note = DNA
  misc_feature 16..20: note = RNA
gcngaggtgaagcgaagtgc

SEQ ID NO: 89 - DNA, 20 bp, synthetic construct
  source 1..20: mol_type = other DNA
  modified_base 1: mod_base = OTHER; note = 2'-O-methoxyethyl modified nucleotide with phosphorothioate linkage
  modified_base 2: mod_base = OTHER; note = 2'-O-methoxyethyl 5-methylcytosine with phosphorothioate linkage
  modified_base 3: mod_base = OTHER; note = 2'-O-methoxyethyl modified nucleotide with phosphorothioate linkage
  modified_base 4: mod_base = OTHER; note = 2'-O-methoxyethyl modified nucleotide with phosphorothioate linkage
  modified_base 5: mod_base = OTHER; note = 2'-O-methyl 2,6-diaminopurine with phosphorothioate linkage
  modified_base 6: mod_base = OTHER; note = Nucleotide with phosphorothioate linkage
  modified_base 7: mod_base = OTHER; note = Nucleotide with phosphorothioate linkage
  modified_base 8: mod_base = OTHER; note = Thymine with phosphorothioate linkage
  modified_base 9: mod_base = OTHER; note = Nucleotide with phosphorothioate linkage
  modified_base 10: mod_base = OTHER; note = Nucleotide with phosphorothioate linkage
  modified_base 11: mod_base = OTHER; note = Nucleotide with phosphorothioate linkage
  modified_base 12: mod_base = OTHER; note = Nucleotide with phosphorothioate linkage
  modified_base 13: mod_base = OTHER; note = 5-methylcytosine with phosphorothioate linkage
  modified_base 14: mod_base = OTHER; note = Nucleotide with phosphorothioate linkage
  modified_base 15: mod_base = OTHER; note = Nucleotide with phosphorothioate linkage
  modified_base 16: mod_base = OTHER; note = 2'-O-methoxyethyl modified nucleotide with phosphorothioate linkage
  modified_base 17: mod_base = OTHER; note = 2'-O-methoxyethyl modified nucleotide with phosphorothioate linkage
  modified_base 18: mod_base = OTHER; note = 2'-O-methoxyethyl modified thymine with phosphorothioate linkage
  modified_base 19: mod_base = OTHER; note = 2'-O-methoxyethyl modified nucleotide with phosphorothioate linkage
  modified_base 20: mod_base = OTHER; note = 2'-O-methoxyethyl 5-methylcytosine
  misc_feature 1..5: note = RNA
  misc_feature 6..15: note = DNA
  misc_feature 16..20: note = RNA
gcagnggtgaagcgaagtgc

SEQ ID NO: 90 - DNA, 20 bp, synthetic construct
  source 1..20: mol_type = other DNA
  modified_base 1: mod_base = OTHER; note = 2'-O-methoxyethyl modified nucleotide with phosphorothioate linkage
  modified_base 2: mod_base = OTHER; note = 2'-O-methoxyethyl 5-methylcytosine with phosphorothioate linkage
  modified_base 3: mod_base = OTHER; note = 2'-O-methoxyethyl modified nucleotide with phosphorothioate linkage
  modified_base 4: mod_base = OTHER; note = 2'-O-methoxyethyl modified nucleotide with phosphorothioate linkage
  modified_base 5: mod_base = OTHER; note = 2'-O-methoxyethyl modified nucleotide with phosphorothioate linkage
  modified_base 6: mod_base = OTHER; note = Nucleotide with phosphorothioate linkage
  modified_base 7: mod_base = OTHER; note = Nucleotide with phosphorothioate linkage
  modified_base 8: mod_base = OTHER; note = Thymine with phosphorothioate linkage
  modified_base 9: mod_base = OTHER; note = Nucleotide with phosphorothioate linkage
  modified_base 10: mod_base = OTHER; note = Nucleotide with phosphorothioate linkage
  modified_base 11: mod_base = OTHER; note = Nucleotide with phosphorothioate linkage
  modified_base 12: mod_base = OTHER; note = Nucleotide with phosphorothioate linkage
  modified_base 13: mod_base = OTHER; note = 5-methylcytosine with phosphorothioate linkage
  modified_base 14: mod_base = OTHER; note = Nucleotide with phosphorothioate linkage
  modified_base 15: mod_base = OTHER; note = Nucleotide with phosphorothioate linkage
  modified_base 16: mod_base = OTHER; note = 2'-O-methyl 2,6-diaminopurine with phosphorothioate linkage
  modified_base 17: mod_base = OTHER; note = 2'-O-methoxyethyl modified nucleotide with phosphorothioate linkage
  modified_base 18: mod_base = OTHER; note = 2'-O-methoxyethyl modified thymine with phosphorothioate linkage
  modified_base 19: mod_base = OTHER; note = 2'-O-methoxyethyl modified nucleotide with phosphorothioate linkage
  modified_base 20: mod_base = OTHER; note = 2'-O-methoxyethyl 5-methylcytosine
  misc_feature 1..5: note = RNA
  misc_feature 6..15: note = DNA
  misc_feature 16..20: note = RNA
gcagaggtgaagcgangtgc

SEQ ID NO: 91 - DNA, 20 bp, synthetic construct
  source 1..20: mol_type = other DNA
  modified_base 1: mod_base = OTHER; note = 2'-O-methyl modified nucleotide with phosphorothioate linkage
  modified_base 2: mod_base = OTHER; note = 2'-O-methoxyethyl 5-methylcytosine with phosphorothioate linkage
  modified_base 3: mod_base = OTHER; note = 2'-O-methoxyethyl modified nucleotide with phosphorothioate linkage
  modified_base 4: mod_base = OTHER; note = 2'-O-methyl modified nucleotide with phosphorothioate linkage
  modified_base 5: mod_base = OTHER; note = 2'-O-methoxyethyl modified nucleotide with phosphorothioate linkage
  modified_base 6: mod_base = OTHER; note = Nucleotide with phosphorothioate linkage
  modified_base 7: mod_base = OTHER; note = Nucleotide with phosphorothioate linkage
  modified_base 8: mod_base = OTHER; note = Thymine with phosphorothioate linkage
  modified_base 9: mod_base = OTHER; note = Nucleotide with phosphorothioate linkage
  modified_base 10: mod_base = OTHER; note = Nucleotide with phosphorothioate linkage
  modified_base 11: mod_base = OTHER; note = Nucleotide with phosphorothioate linkage
  modified_base 12: mod_base = OTHER; note = Nucleotide with phosphorothioate linkage
  modified_base 13: mod_base = OTHER; note = 5-methylcytosine with phosphorothioate linkage
  modified_base 14: mod_base = OTHER; note = Nucleotide with phosphorothioate linkage
  modified_base 15: mod_base = OTHER; note = Nucleotide with phosphorothioate linkage
  modified_base 16: mod_base = OTHER; note = 2'-O-methoxyethyl modified nucleotide with phosphorothioate linkage
  modified_base 17: mod_base = OTHER; note = 2'-O-methoxyethyl modified nucleotide with phosphorothioate linkage
  modified_base 18: mod_base = OTHER; note = 2'-O-methoxyethyl modified thymine with phosphorothioate linkage
  modified_base 19: mod_base = OTHER; note = 2'-O-methoxyethyl modified nucleotide with phosphorothioate linkage
  modified_base 20: mod_base = OTHER; note = 2'-O-methoxyethyl 5-methylcytosine
  misc_feature 1..5: note = RNA
  misc_feature 6..15: note = DNA
  misc_feature 16..20: note = RNA
gcagaggtgaagcgaagtgc

SEQ ID NO: 92 - DNA, 20 bp, synthetic construct
  source 1..20: mol_type = other DNA
  modified_base 1: mod_base = OTHER; note = 2'-O-methoxyethyl modified nucleotide with phosphorothioate linkage
  modified_base 2: mod_base = OTHER; note = 2'-O-methoxyethyl 5-methylcytosine with phosphorothioate linkage
  modified_base 3: mod_base = OTHER; note = 2'-O-methyl modified nucleotide with phosphorothioate linkage
  modified_base 4: mod_base = OTHER; note = 2'-O-methoxyethyl modified nucleotide with phosphorothioate linkage
  modified_base 5: mod_base = OTHER; note = 2'-O-methyl modified nucleotide with phosphorothioate linkage
  modified_base 6: mod_base = OTHER; note = Nucleotide with phosphorothioate linkage
  modified_base 7: mod_base = OTHER; note = Nucleotide with phosphorothioate linkage
  modified_base 8: mod_base = OTHER; note = Thymine with phosphorothioate linkage
  modified_base 9: mod_base = OTHER; note = Nucleotide with phosphorothioate linkage
  modified_base 10: mod_base = OTHER; note = Nucleotide with phosphorothioate linkage
  modified_base 11: mod_base = OTHER; note = Nucleotide with phosphorothioate linkage
  modified_base 12: mod_base = OTHER; note = Nucleotide with phosphorothioate linkage
  modified_base 13: mod_base = OTHER; note = 5-methylcytosine with phosphorothioate linkage
  modified_base 14: mod_base = OTHER; note = Nucleotide with phosphorothioate linkage
  modified_base 15: mod_base = OTHER; note = Nucleotide with phosphorothioate linkage
  modified_base 16: mod_base = OTHER; note = 2'-O-methoxyethyl modified nucleotide with phosphorothioate linkage
  modified_base 17: mod_base = OTHER; note = 2'-O-methoxyethyl modified nucleotide with phosphorothioate linkage
  modified_base 18: mod_base = OTHER; note = 2'-O-methoxyethyl modified thymine with phosphorothioate linkage
  modified_base 19: mod_base = OTHER; note = 2'-O-methoxyethyl modified nucleotide with phosphorothioate linkage
  modified_base 20: mod_base = OTHER; note = 2'-O-methoxyethyl 5-methylcytosine
  misc_feature 1..5: note = RNA
  misc_feature 6..15: note = DNA
  misc_feature 16..20: note = RNA
gcagaggtgaagcgaagtgc

SEQ ID NO: 93 - DNA, 20 bp, synthetic construct
  source 1..20: mol_type = other DNA
  modified_base 1: mod_base = OTHER; note = 2'-O-methoxyethyl modified nucleotide with phosphorothioate linkage
  modified_base 2: mod_base = OTHER; note = 2'-O-methoxyethyl 5-methylcytosine with phosphorothioate linkage
  modified_base 3: mod_base = OTHER; note = 2'-O-methoxyethyl modified nucleotide with phosphorothioate linkage
  modified_base 4: mod_base = OTHER; note = 2'-O-methoxyethyl modified nucleotide with phosphorothioate linkage
  modified_base 5: mod_base = OTHER; note = 2'-O-methoxyethyl modified nucleotide with phosphorothioate linkage
  modified_base 6: mod_base = OTHER; note = Nucleotide with phosphorothioate linkage
  modified_base 7: mod_base = OTHER; note = Nucleotide with phosphorothioate linkage
  modified_base 8: mod_base = OTHER; note = Thymine with phosphorothioate linkage
  modified_base 9: mod_base = OTHER; note = Nucleotide with phosphorothioate linkage
  modified_base 10: mod_base = OTHER; note = Nucleotide with phosphorothioate linkage
  modified_base 11: mod_base = OTHER; note = Nucleotide with phosphorothioate linkage
  modified_base 12: mod_base = OTHER; note = Nucleotide with phosphorothioate linkage
  modified_base 13: mod_base = OTHER; note = 5-methylcytosine with phosphorothioate linkage
  modified_base 14: mod_base = OTHER; note = Nucleotide with phosphorothioate linkage
  modified_base 15: mod_base = OTHER; note = Nucleotide with phosphorothioate linkage
  modified_base 16: mod_base = OTHER; note = 2'-O-methoxyethyl modified nucleotide with phosphorothioate linkage
  modified_base 17: mod_base = OTHER; note = 2'-O-methyl modified nucleotide with phosphorothioate linkage
  modified_base 18: mod_base = OTHER; note = 2'-O-methoxyethyl modified thymine with phosphorothioate linkage
  modified_base 19: mod_base = OTHER; note = 2'-O-methyl modified nucleotide with phosphorothioate linkage
  modified_base 20: mod_base = OTHER; note = 2'-O-methoxyethyl 5-methylcytosine
  misc_feature 1..5: note = RNA
  misc_feature 6..15: note = DNA
  misc_feature 16..20: note = RNA
gcagaggtgaagcgaagtgc

SEQ ID NO: 94 - DNA, 20 bp, synthetic construct
  source 1..20: mol_type = other DNA
  modified_base 1: mod_base = OTHER; note = 2'-O-methyl modified nucleotide with phosphorothioate linkage
  modified_base 2: mod_base = OTHER; note = 2'-O-methoxyethyl 5-methylcytosine with phosphorothioate linkage
  modified_base 3: mod_base = OTHER; note = 2'-O-methyl modified nucleotide with phosphorothioate linkage
  modified_base 4: mod_base = OTHER; note = 2'-O-methoxyethyl modified nucleotide with phosphorothioate linkage
  modified_base 5: mod_base = OTHER; note = 2'-O-methyl modified nucleotide with phosphorothioate linkage
  modified_base 6: mod_base = OTHER; note = Nucleotide with phosphorothioate linkage
  modified_base 7: mod_base = OTHER; note = Nucleotide with phosphorothioate linkage
  modified_base 8: mod_base = OTHER; note = Thymine with phosphorothioate linkage
  modified_base 9: mod_base = OTHER; note = Nucleotide with phosphorothioate linkage
  modified_base 10: mod_base = OTHER; note = Nucleotide with phosphorothioate linkage
  modified_base 11: mod_base = OTHER; note = Nucleotide with phosphorothioate linkage
  modified_base 12: mod_base = OTHER; note = Nucleotide with phosphorothioate linkage
  modified_base 13: mod_base = OTHER; note = 5-methylcytosine with phosphorothioate linkage
  modified_base 14: mod_base = OTHER; note = Nucleotide with phosphorothioate linkage
  modified_base 15: mod_base = OTHER; note = Nucleotide with phosphorothioate linkage
  modified_base 16: mod_base = OTHER; note = 2'-O-methoxyethyl modified nucleotide with phosphorothioate linkage
  modified_base 17: mod_base = OTHER; note = 2'-O-methoxyethyl modified nucleotide with phosphorothioate linkage
  modified_base 18: mod_base = OTHER; note = 2'-O-methoxyethyl modified thymine with phosphorothioate linkage
  modified_base 19: mod_base = OTHER; note = 2'-O-methoxyethyl modified nucleotide with phosphorothioate linkage
  modified_base 20: mod_base = OTHER; note = 2'-O-methoxyethyl 5-methylcytosine
  misc_feature 1..5: note = RNA
  misc_feature 6..15: note = DNA
  misc_feature 16..20: note = RNA
gcagaggtgaagcgaagtgc

SEQ ID NO: 95 - DNA, 20 bp, synthetic construct
  source 1..20: mol_type = other DNA
  modified_base 1: mod_base = OTHER; note = 2'-O-methoxyethyl modified nucleotide with phosphorothioate linkage
  modified_base 2: mod_base = OTHER; note = 2'-O-methoxyethyl 5-methylcytosine with phosphorothioate linkage
  modified_base 3: mod_base = OTHER; note = 2'-O-methoxyethyl modified nucleotide with phosphorothioate linkage
  modified_base 4: mod_base = OTHER; note = 2'-O-methoxyethyl modified nucleotide with phosphorothioate linkage
  modified_base 5: mod_base = OTHER; note = 2'-O-methoxyethyl modified nucleotide with phosphorothioate linkage
  modified_base 6: mod_base = OTHER; note = Nucleotide with phosphorothioate linkage
  modified_base 7: mod_base = OTHER; note = Nucleotide with phosphorothioate linkage
  modified_base 8: mod_base = OTHER; note = Thymine with phosphorothioate linkage
  modified_base 9: mod_base = OTHER; note = Nucleotide with phosphorothioate linkage
  modified_base 10: mod_base = OTHER; note = Nucleotide with phosphorothioate linkage
  modified_base 11: mod_base = OTHER; note = Nucleotide with phosphorothioate linkage
  modified_base 12: mod_base = OTHER; note = Nucleotide with phosphorothioate linkage
  modified_base 13: mod_base = OTHER; note = 5-methylcytosine with phosphorothioate linkage
  modified_base 14: mod_base = OTHER; note = Nucleotide with phosphorothioate linkage
  modified_base 15: mod_base = OTHER; note = Nucleotide with phosphorothioate linkage
  modified_base 16: mod_base = OTHER; note = 2'-O-methyl modified nucleotide with phosphorothioate linkage
  modified_base 17: mod_base = OTHER; note = 2'-O-methyl modified nucleotide with phosphorothioate linkage
  modified_base 18: mod_base = OTHER; note = 2'-O-methoxyethyl modified thymine with phosphorothioate linkage
  modified_base 19: mod_base = OTHER; note = 2'-O-methyl modified nucleotide with phosphorothioate linkage
  modified_base 20: mod_base = OTHER; note = 2'-O-methoxyethyl 5-methylcytosine
  misc_feature 1..5: note = RNA
  misc_feature 6..15: note = DNA
  misc_feature 16..20: note = RNA
gcagaggtgaagcgaagtgc

SEQ ID NO: 96 - DNA, 20 bp, synthetic construct
  source 1..20: mol_type = other DNA
  modified_base 1: mod_base = OTHER; note = 2'-O-methyl modified nucleotide with phosphorothioate linkage
  modified_base 2: mod_base = OTHER; note = 2'-O-methoxyethyl 5-methylcytosine with phosphorothioate linkage
  modified_base 3: mod_base = OTHER; note = 2'-O-methoxyethyl modified nucleotide with phosphorothioate linkage
  modified_base 4: mod_base = OTHER; note = 2'-O-methoxyethyl modified nucleotide with phosphorothioate linkage
  modified_base 5: mod_base = OTHER; note = 2'-O-methoxyethyl modified nucleotide with phosphorothioate linkage
  modified_base 6: mod_base = OTHER; note = Nucleotide with phosphorothioate linkage
  modified_base 7: mod_base = OTHER; note = Nucleotide with phosphorothioate linkage
  modified_base 8: mod_base = OTHER; note = Thymine with phosphorothioate linkage
  modified_base 9: mod_base = OTHER; note = Nucleotide with phosphorothioate linkage
  modified_base 10: mod_base = OTHER; note = Nucleotide with phosphorothioate linkage
  modified_base 11: mod_base = OTHER; note = Nucleotide with phosphorothioate linkage
  modified_base 12: mod_base = OTHER; note = Nucleotide with phosphorothioate linkage
  modified_base 13: mod_base = OTHER; note = 5-methylcytosine with phosphorothioate linkage
  modified_base 14: mod_base = OTHER; note = Nucleotide with phosphorothioate linkage
  modified_base 15: mod_base = OTHER; note = Nucleotide with phosphorothioate linkage
  modified_base 16: mod_base = OTHER; note = 2'-O-methoxyethyl modified nucleotide with phosphorothioate linkage
  modified_base 17: mod_base = OTHER; note = 2'-O-methoxyethyl modified nucleotide with phosphorothioate linkage
  modified_base 18: mod_base = OTHER; note = 2'-O-methoxyethyl modified thymine with phosphorothioate linkage
  modified_base 19: mod_base = OTHER; note = 2'-O-methoxyethyl modified nucleotide with phosphorothioate linkage
  modified_base 20: mod_base = OTHER; note = 2'-O-methyl 5-methylcytosine
  misc_feature 1..5: note = RNA
  misc_feature 6..15: note = DNA
  misc_feature 16..20: note = RNA
gcagaggtgaagcgaagtgc

SEQ ID NO: 97 - DNA, 20 bp, synthetic construct
  source 1..20: mol_type = other DNA
  modified_base 1: mod_base = OTHER; note = 2'-O-methoxyethyl modified nucleotide with phosphorothioate linkage
  modified_base 2: mod_base = OTHER; note = 2'-O-methoxyethyl 5-methylcytosine with phosphorothioate linkage
  modified_base 3: mod_base = OTHER; note = 2'-O-methoxyethyl modified nucleotide with phosphorothioate linkage
  modified_base 4: mod_base = OTHER; note = 2'-O-methoxyethyl modified nucleotide with phosphorothioate linkage
  modified_base 5: mod_base = OTHER; note = 2'-O-methoxyethyl modified nucleotide with phosphorothioate linkage
  modified_base 6: mod_base = OTHER; note = Nucleotide with phosphorothioate linkage
  modified_base 7: mod_base = OTHER; note = Nucleotide with phosphorothioate linkage
  modified_base 8: mod_base = OTHER; note = Thymine with phosphorothioate linkage
  modified_base 9: mod_base = OTHER; note = Nucleotide with phosphorothioate linkage
  modified_base 10: mod_base = OTHER; note = Nucleotide with S-stereo-defined phosphorothioate linkage
  modified_base 11: mod_base = OTHER; note = Nucleotide with phosphorothioate linkage
  modified_base 12: mod_base = OTHER; note = Nucleotide with phosphorothioate linkage
  modified_base 13: mod_base = OTHER; note = 5-methylcytosine with phosphorothioate linkage
  modified_base 14: mod_base = OTHER; note = Nucleotide with phosphorothioate linkage
  modified_base 15: mod_base = OTHER; note = Nucleotide with phosphorothioate linkage
  modified_base 16: mod_base = OTHER; note = 2'-O-methoxyethyl modified nucleotide with phosphorothioate linkage
  modified_base 17: mod_base = OTHER; note = 2'-O-methoxyethyl modified nucleotide with phosphorothioate linkage
  modified_base 18: mod_base = OTHER; note = 2'-O-methoxyethyl modified thymine with phosphorothioate linkage
  modified_base 19: mod_base = OTHER; note = 2'-O-methoxyethyl modified nucleotide with phosphorothioate linkage
  modified_base 20: mod_base = OTHER; note = 2'-O-methoxyethyl 5-methylcytosine
  misc_feature 1..5: note = RNA
  misc_feature 6..15: note = DNA
  misc_feature 16..20: note = RNA
gcagaggtgaagcgaagtgc

SEQ ID NO: 98 - DNA, 20 bp, synthetic construct
  source 1..20: mol_type = other DNA
  modified_base 1: mod_base = OTHER; note = 2'-O-methoxyethyl modified nucleotide with phosphorothioate linkage
  modified_base 2: mod_base = OTHER; note = 2'-O-methoxyethyl 5-methylcytosine with phosphorothioate linkage
  modified_base 3: mod_base = OTHER; note = 2'-O-methoxyethyl modified nucleotide with phosphorothioate linkage
  modified_base 4: mod_base = OTHER; note = 2'-O-methoxyethyl modified nucleotide with phosphorothioate linkage
  modified_base 5: mod_base = OTHER; note = 2'-O-methoxyethyl modified nucleotide with phosphorothioate linkage
  modified_base 6: mod_base = OTHER; note = Nucleotide with phosphorothioate linkage
  modified_base 7: mod_base = OTHER; note = Nucleotide with phosphorothioate linkage
  modified_base 8: mod_base = OTHER; note = Thymine with phosphorothioate linkage
  modified_base 9: mod_base = OTHER; note = Nucleotide with phosphorothioate linkage
  modified_base 10: mod_base = OTHER; note = Nucleotide with phosphorothioate linkage
  modified_base 11: mod_base = OTHER; note = Nucleotide with S-stereo-defined phosphorothioate linkage
  modified_base 12: mod_base = OTHER; note = Nucleotide with phosphorothioate linkage
  modified_base 13: mod_base = OTHER; note = 5-methylcytosine with phosphorothioate linkage
  modified_base 14: mod_base = OTHER; note = Nucleotide with phosphorothioate linkage
  modified_base 15: mod_base = OTHER; note = Nucleotide with phosphorothioate linkage
  modified_base 16: mod_base = OTHER; note = 2'-O-methoxyethyl modified nucleotide with phosphorothioate linkage
  modified_base 17: mod_base = OTHER; note = 2'-O-methoxyethyl modified nucleotide with phosphorothioate linkage
  modified_base 18: mod_base = OTHER; note = 2'-O-methoxyethyl modified thymine with phosphorothioate linkage
  modified_base 19: mod_base = OTHER; note = 2'-O-methoxyethyl modified nucleotide with phosphorothioate linkage
  modified_base 20: mod_base = OTHER; note = 2'-O-methoxyethyl 5-methylcytosine
  misc_feature 1..5: note = RNA
  misc_feature 6..15: note = DNA
  misc_feature 16..20: note = RNA
gcagaggtgaagcgaagtgc

SEQ ID NO: 99 - DNA, 20 bp, synthetic construct
  source 1..20: mol_type = other DNA
  modified_base 1: mod_base = OTHER; note = 2'-O-methoxyethyl modified nucleotide with phosphorothioate linkage
  modified_base 2: mod_base = OTHER; note = 2'-O-methoxyethyl 5-methylcytosine with phosphorothioate linkage
  modified_base 3: mod_base = OTHER; note = 2'-O-methoxyethyl modified nucleotide with phosphorothioate linkage
  modified_base 4: mod_base = OTHER; note = 2'-O-methoxyethyl modified nucleotide with phosphorothioate linkage
  modified_base 5: mod_base = OTHER; note = 2'-O-methoxyethyl modified nucleotide with phosphorothioate linkage
  modified_base 6: mod_base = OTHER; note = Nucleotide with phosphorothioate linkage
  modified_base 7: mod_base = OTHER; note = Nucleotide with phosphorothioate linkage
  modified_base 8: mod_base = OTHER; note = Thymine with phosphorothioate linkage
  modified_base 9: mod_base = OTHER; note = Nucleotide with phosphorothioate linkage
  modified_base 10: mod_base = OTHER; note = Nucleotide with phosphorothioate linkage
  modified_base 11: mod_base = OTHER; note = Nucleotide with phosphorothioate linkage
  modified_base 12: mod_base = OTHER; note = Nucleotide with phosphorothioate linkage
  modified_base 13: mod_base = OTHER; note = 5-methylcytosine with phosphorothioate linkage
  modified_base 14: mod_base = OTHER; note = Nucleotide with phosphorothioate linkage
  modified_base 15: mod_base = OTHER; note = Nucleotide with S-stereo-defined phosphorothioate linkage
  modified_base 16: mod_base = OTHER; note = 2'-O-methoxyethyl modified nucleotide with phosphorothioate linkage
  modified_base 17: mod_base = OTHER; note = 2'-O-methoxyethyl modified nucleotide with phosphorothioate linkage
  modified_base 18: mod_base = OTHER; note = 2'-O-methoxyethyl modified thymine with phosphorothioate linkage
  modified_base 19: mod_base = OTHER; note = 2'-O-methoxyethyl modified nucleotide with phosphorothioate linkage
  modified_base 20: mod_base = OTHER; note = 2'-O-methoxyethyl 5-methylcytosine
  misc_feature 1..5: note = RNA
  misc_feature 6..15: note = DNA
  misc_feature 16..20: note = RNA
gcagaggtgaagcgaagtgc

SEQ ID NO: 100 - DNA, 20 bp, synthetic construct
  source 1..20: mol_type = other DNA
  modified_base 1: mod_base = OTHER; note = 2'-O-methoxyethyl modified nucleotide with phosphorothioate linkage
  modified_base 2: mod_base = OTHER; note = 2'-O-methoxyethyl 5-methylcytosine with phosphorothioate linkage
  modified_base 3: mod_base = OTHER; note = 2'-O-methoxyethyl modified nucleotide with phosphorothioate linkage
  modified_base 4: mod_base = OTHER; note = 2'-O-methoxyethyl modified nucleotide with phosphorothioate linkage
  modified_base 5: mod_base = OTHER; note = 2'-O-methoxyethyl modified nucleotide with phosphorothioate linkage
  modified_base 6: mod_base = OTHER; note = 8-amino-guanosine with phosphorothioate linkage
  modified_base 7: mod_base = OTHER; note = Nucleotide with phosphorothioate linkage
  modified_base 8: mod_base = OTHER; note = Thymine with phosphorothioate linkage
  modified_base 9: mod_base = OTHER; note = Nucleotide with phosphorothioate linkage
  modified_base 10: mod_base = OTHER; note = Nucleotide with phosphorothioate linkage
  modified_base 11: mod_base = OTHER; note = Nucleotide with phosphorothioate linkage
  modified_base 12: mod_base = OTHER; note = Nucleotide with phosphorothioate linkage
  modified_base 13: mod_base = OTHER; note = 5-methylcytosine with phosphorothioate linkage
  modified_base 14: mod_base = OTHER; note = Nucleotide with phosphorothioate linkage
  modified_base 15: mod_base = OTHER; note = Nucleotide with phosphorothioate linkage
  modified_base 16: mod_base = OTHER; note = 2'-O-methoxyethyl modified nucleotide with phosphorothioate linkage
  modified_base 17: mod_base = OTHER; note = 2'-O-methoxyethyl modified nucleotide with phosphorothioate linkage
  modified_base 18: mod_base = OTHER; note = 2'-O-methoxyethyl modified thymine with phosphorothioate linkage
  modified_base 19: mod_base = OTHER; note = 2'-O-methoxyethyl modified nucleotide with phosphorothioate linkage
  modified_base 20: mod_base = OTHER; note = 2'-O-methoxyethyl 5-methylcytosine
  misc_feature 1..5: note = RNA
  misc_feature 6..15: note = DNA
  misc_feature 16..20: note = RNA
gcagaggtgaagcgaagtgc

SEQ ID NO: 101 - DNA, 20 bp, synthetic construct
  source 1..20: mol_type = other DNA
  modified_base 1: mod_base = OTHER; note = 2'-O-methoxyethyl modified nucleotide with phosphorothioate linkage
  modified_base 2: mod_base = OTHER; note = 2'-O-methoxyethyl 5-methylcytosine with phosphorothioate linkage
  modified_base 3: mod_base = OTHER; note = 2'-O-methoxyethyl modified nucleotide with phosphorothioate linkage
  modified_base 4: mod_base = OTHER; note = 2'-O-methoxyethyl modified nucleotide with phosphorothioate linkage
  modified_base 5: mod_base = OTHER; note = 2'-O-methoxyethyl modified nucleotide with phosphorothioate linkage
  modified_base 6: mod_base = OTHER; note = Nucleotide with phosphorothioate linkage
  modified_base 7: mod_base = OTHER; note = 8-amino-guanosine with phosphorothioate linkage
  modified_base 8: mod_base = OTHER; note = Thymine with phosphorothioate linkage
  modified_base 9: mod_base = OTHER; note = Nucleotide with phosphorothioate linkage
  modified_base 10: mod_base = OTHER; note = Nucleotide with phosphorothioate linkage
  modified_base 11: mod_base = OTHER; note = Nucleotide with phosphorothioate linkage
  modified_base 12: mod_base = OTHER; note = Nucleotide with phosphorothioate linkage
  modified_base 13: mod_base = OTHER; note = 5-methylcytosine with phosphorothioate linkage
  modified_base 14: mod_base = OTHER; note = Nucleotide with phosphorothioate linkage
  modified_base 15: mod_base = OTHER; note = Nucleotide with phosphorothioate linkage
  modified_base 16: mod_base = OTHER; note = 2'-O-methoxyethyl modified nucleotide with phosphorothioate linkage
  modified_base 17: mod_base = OTHER; note = 2'-O-methoxyethyl modified nucleotide with phosphorothioate linkage
  modified_base 18: mod_base = OTHER; note = 2'-O-methoxyethyl modified thymine with phosphorothioate linkage
  modified_base 19: mod_base = OTHER; note = 2'-O-methoxyethyl modified nucleotide with phosphorothioate linkage
  modified_base 20: mod_base = OTHER; note = 2'-O-methoxyethyl 5-methylcytosine
  misc_feature 1..5: note = RNA
  misc_feature 6..15: note = DNA
  misc_feature 16..20: note = RNA
gcagaggtgaagcgaagtgc

SEQ ID NO: 102 - DNA, 20 bp, synthetic construct
  source 1..20: mol_type = other DNA
  modified_base 1: mod_base = OTHER; note = 2'-O-methoxyethyl modified nucleotide with phosphorothioate linkage
  modified_base 2: mod_base = OTHER; note = 2'-O-methoxyethyl 5-methylcytosine with phosphorothioate linkage
  modified_base 3: mod_base = OTHER; note = 2'-O-methoxyethyl modified nucleotide with phosphorothioate linkage
  modified_base 4: mod_base = OTHER; note = 2'-O-methoxyethyl modified nucleotide with phosphorothioate linkage
  modified_base 5: mod_base = OTHER; note = 2'-O-methoxyethyl modified nucleotide with phosphorothioate linkage
  modified_base 6: mod_base = OTHER; note = Nucleotide with phosphorothioate linkage
  modified_base 7: mod_base = OTHER; note = Nucleotide with phosphorothioate linkage
  modified_base 8: mod_base = OTHER; note = 2-thio-thymine with phosphorothioate linkage
  modified_base 9: mod_base = OTHER; note = Nucleotide with phosphorothioate linkage
  modified_base 10: mod_base = OTHER; note = Nucleotide with phosphorothioate linkage
  modified_base 11: mod_base = OTHER; note = Nucleotide with phosphorothioate linkage
  modified_base 12: mod_base = OTHER; note = Nucleotide with phosphorothioate linkage
  modified_base 13: mod_base = OTHER; note = 5-methylcytosine with phosphorothioate linkage
  modified_base 14: mod_base = OTHER; note = Nucleotide with phosphorothioate linkage
  modified_base 15: mod_base = OTHER; note = Nucleotide with phosphorothioate linkage
  modified_base 16: mod_base = OTHER; note = 2'-O-methoxyethyl modified nucleotide with phosphorothioate linkage
  modified_base 17: mod_base = OTHER; note = 2'-O-methoxyethyl modified nucleotide with phosphorothioate linkage
  modified_base 18: mod_base = OTHER; note = 2'-O-methoxyethyl modified thymine with phosphorothioate linkage
  modified_base 19: mod_base = OTHER; note = 2'-O-methoxyethyl modified nucleotide with phosphorothioate linkage
  modified_base 20: mod_base = OTHER; note = 2'-O-methoxyethyl 5-methylcytosine
  misc_feature 1..5: note = RNA
  misc_feature 6..15: note = DNA
  misc_feature 16..20: note = RNA
gcagaggtgaagcgaagtgc

SEQ ID NO: 103 - DNA, 20 bp, synthetic construct
  source 1..20: mol_type = other DNA
  modified_base 1: mod_base = OTHER; note = 2'-O-methoxyethyl modified nucleotide with phosphorothioate linkage
  modified_base 2: mod_base = OTHER; note = 2'-O-methoxyethyl 5-methylcytosine with phosphorothioate linkage
  modified_base 3: mod_base = OTHER; note = 2'-O-methoxyethyl modified nucleotide with phosphorothioate linkage
  modified_base 4: mod_base = OTHER; note = 2'-O-methoxyethyl modified nucleotide with phosphorothioate linkage
  modified_base 5: mod_base = OTHER; note = 2'-O-methoxyethyl modified nucleotide with phosphorothioate linkage
  modified_base 6: mod_base = OTHER; note = Nucleotide with S-stereo-defined phosphorothioate linkage
  modified_base 7: mod_base = OTHER; note = Nucleotide with phosphorothioate linkage
  modified_base 8: mod_base = OTHER; note = Thymine with phosphorothioate linkage
  modified_base 9: mod_base = OTHER; note = Nucleotide with phosphorothioate linkage
  modified_base 10: mod_base = OTHER; note = Nucleotide with phosphorothioate linkage
  modified_base 11: mod_base = OTHER; note = Nucleotide with phosphorothioate linkage
  modified_base 12: mod_base = OTHER; note = Nucleotide with phosphorothioate linkage
  modified_base 13: mod_base = OTHER; note = 5-methylcytosine with phosphorothioate linkage
  modified_base 14: mod_base = OTHER; note = Nucleotide with phosphorothioate linkage
  modified_base 15: mod_base = OTHER; note = Nucleotide with phosphorothioate linkage
  modified_base 16: mod_base = OTHER; note = 2'-O-methoxyethyl modified nucleotide with phosphorothioate linkage
  modified_base 17: mod_base = OTHER; note = 2'-O-methoxyethyl modified nucleotide with phosphorothioate linkage
  modified_base 18: mod_base = OTHER; note = 2'-O-methoxyethyl modified thymine with phosphorothioate linkage
  modified_base 19: mod_base = OTHER; note = 2'-O-methoxyethyl modified nucleotide with phosphorothioate linkage
  modified_base 20: mod_base = OTHER; note = 2'-O-methoxyethyl 5-methylcytosine
  misc_feature 1..5: note = RNA
  misc_feature 6..15: note = DNA
  misc_feature 16..20: note = RNA
gcagaggtgaagcgaagtgc

SEQ ID NO: 104 - DNA, 20 bp, synthetic construct
  source 1..20: mol_type = other DNA
  modified_base 1: mod_base = OTHER; note = 2'-O-methoxyethyl modified nucleotide with phosphorothioate linkage
  modified_base 2: mod_base = OTHER; note = 2'-O-methoxyethyl 5-methylcytosine with phosphorothioate linkage
  modified_base 3: mod_base = OTHER; note = 2'-O-methoxyethyl modified nucleotide with phosphorothioate linkage
  modified_base 4: mod_base = OTHER; note = 2'-O-methoxyethyl modified nucleotide with phosphorothioate linkage
  modified_base 5: mod_base = OTHER; note = 2'-O-methoxyethyl modified nucleotide with phosphorothioate linkage
  modified_base 6: mod_base = OTHER; note = Nucleotide with phosphorothioate linkage
  modified_base 7: mod_base = OTHER; note = Nucleotide with S-stereo-defined phosphorothioate linkage
  modified_base 8: mod_base = OTHER; note = Thymine with phosphorothioate linkage
  modified_base 9: mod_base = OTHER; note = Nucleotide with phosphorothioate linkage
  modified_base 10: mod_base = OTHER; note = Nucleotide with phosphorothioate linkage
  modified_base 11: mod_base = OTHER; note = Nucleotide with phosphorothioate linkage
  modified_base 12: mod_base = OTHER; note = Nucleotide with phosphorothioate linkage
  modified_base 13: mod_base = OTHER; note = 5-methylcytosine with phosphorothioate linkage
  modified_base 14: mod_base = OTHER; note = Nucleotide with phosphorothioate linkage
  modified_base 15: mod_base = OTHER; note = Nucleotide with phosphorothioate linkage
  modified_base 16: mod_base = OTHER; note = 2'-O-methoxyethyl modified nucleotide with phosphorothioate linkage
  modified_base 17: mod_base = OTHER; note = 2'-O-methoxyethyl modified nucleotide with phosphorothioate linkage
  modified_base 18: mod_base = OTHER; note = 2'-O-methoxyethyl modified thymine with phosphorothioate linkage
  modified_base 19: mod_base = OTHER; note = 2'-O-methoxyethyl modified nucleotide with phosphorothioate linkage
  modified_base 20: mod_base = OTHER; note = 2'-O-methoxyethyl 5-methylcytosine
  misc_feature 1..5: note = RNA
  misc_feature 6..15: note = DNA
  misc_feature 16..20: note = RNA
gcagaggtgaagcgaagtgc

SEQ ID NO: 105 - DNA, 20 bp, synthetic construct
  source 1..20: mol_type = other DNA
  modified_base 1: mod_base = OTHER; note = 2'-O-methoxyethyl modified nucleotide with phosphorothioate linkage
  modified_base 2: mod_base = OTHER; note = 2'-O-methoxyethyl 5-methylcytosine with phosphorothioate linkage
  modified_base 3: mod_base = OTHER; note = 2'-O-methoxyethyl modified nucleotide with phosphorothioate linkage
  modified_base 4: mod_base = OTHER; note = 2'-O-methoxyethyl modified nucleotide with phosphorothioate linkage
  modified_base 5: mod_base = OTHER; note = 2'-O-methoxyethyl modified nucleotide with phosphorothioate linkage
  modified_base 6: mod_base = OTHER; note = Nucleotide with phosphorothioate linkage
  modified_base 7: mod_base = OTHER; note = Nucleotide with phosphorothioate linkage
  modified_base 8: mod_base = OTHER; note = Thymine with S-stereo-defined phosphorothioate linkage
  modified_base 9: mod_base = OTHER; note = Nucleotide with phosphorothioate linkage
  modified_base 10: mod_base = OTHER; note = Nucleotide with phosphorothioate linkage
  modified_base 11: mod_base = OTHER; note = Nucleotide with phosphorothioate linkage
  modified_base 12: mod_base = OTHER; note = Nucleotide with phosphorothioate linkage
  modified_base 13: mod_base = OTHER; note = 5-methylcytosine with phosphorothioate linkage
  modified_base 14: mod_base = OTHER; note = Nucleotide with phosphorothioate linkage
  modified_base 15: mod_base = OTHER; note = Nucleotide with phosphorothioate linkage
  modified_base 16: mod_base = OTHER; note = 2'-O-methoxyethyl modified nucleotide with phosphorothioate linkage
  modified_base 17: mod_base = OTHER; note = 2'-O-methoxyethyl modified nucleotide with phosphorothioate linkage
  modified_base 18: mod_base = OTHER; note = 2'-O-methoxyethyl modified thymine with phosphorothioate linkage
  modified_base 19: mod_base = OTHER; note = 2'-O-methoxyethyl modified nucleotide with phosphorothioate linkage
  modified_base 20: mod_base = OTHER; note = 2'-O-methoxyethyl 5-methylcytosine
  misc_feature 1..5: note = RNA
  misc_feature 6..15: note = DNA
  misc_feature 16..20: note = RNA
gcagaggtgaagcgaagtgc

SEQ ID NO: 106 - DNA, 20 bp, synthetic construct
  source 1..20: mol_type = other DNA
  modified_base 1: mod_base = OTHER; note = 2'-O-methoxyethyl modified nucleotide with phosphorothioate linkage
  modified_base 2: mod_base = OTHER; note = 2'-O-methoxyethyl 5-methylcytosine with phosphorothioate linkage
  modified_base 3: mod_base = OTHER; note = 2'-O-methoxyethyl modified nucleotide with phosphorothioate linkage
  modified_base 4: mod_base = OTHER; note = 2'-O-methoxyethyl modified nucleotide with phosphorothioate linkage
  modified_base 5: mod_base = OTHER; note = 2'-O-methoxyethyl modified nucleotide with phosphorothioate linkage
  modified_base 6: mod_base = OTHER; note = Nucleotide with phosphorothioate linkage
  modified_base 7: mod_base = OTHER; note = Nucleotide with phosphorothioate linkage
  modified_base 8: mod_base = OTHER; note = Thymine with phosphorothioate linkage
  modified_base 9: mod_base = OTHER; note = Nucleotide with S-stereo-defined phosphorothioate linkage
  modified_base 10: mod_base = OTHER; note = Nucleotide with phosphorothioate linkage
  modified_base 11: mod_base = OTHER; note = Nucleotide with phosphorothioate linkage
  modified_base 12: mod_base = OTHER; note = Nucleotide with phosphorothioate linkage
  modified_base 13: mod_base = OTHER; note = 5-methylcytosine with phosphorothioate linkage
  modified_base 14: mod_base = OTHER; note = Nucleotide with phosphorothioate linkage
  modified_base 15: mod_base = OTHER; note = Nucleotide with phosphorothioate linkage
  modified_base 16: mod_base = OTHER; note = 2'-O-methoxyethyl modified nucleotide with phosphorothioate linkage
  modified_base 17: mod_base = OTHER; note = 2'-O-methoxyethyl modified nucleotide with phosphorothioate linkage
  modified_base 18: mod_base = OTHER; note = 2'-O-methoxyethyl modified thymine with phosphorothioate linkage
  modified_base 19: mod_base = OTHER; note = 2'-O-methoxyethyl modified nucleotide with phosphorothioate linkage
  modified_base 20: mod_base = OTHER; note = 2'-O-methoxyethyl 5-methylcytosine
  misc_feature 1..5: note = RNA
  misc_feature 6..15: note = DNA
  misc_feature 16..20: note = RNA
gcagaggtgaagcgaagtgc

SEQ ID NO: 107 - DNA, 20 bp, synthetic construct
  source 1..20: mol_type = other DNA
  modified_base 1: mod_base = OTHER; note = 2'-O-methoxyethyl modified nucleotide with phosphorothioate linkage
  modified_base 2: mod_base = OTHER; note = 2'-O-methoxyethyl 5-methylcytosine with phosphorothioate linkage
  modified_base 3: mod_base = OTHER; note = 2'-O-methoxyethyl modified nucleotide with phosphorothioate linkage
  modified_base 4: mod_base = OTHER; note = 2'-O-methoxyethyl modified nucleotide with phosphorothioate linkage
  modified_base 5: mod_base = OTHER; note = 2'-O-methoxyethyl modified nucleotide with phosphorothioate linkage
  modified_base 6: mod_base = OTHER; note = Nucleotide with phosphorothioate linkage
  modified_base 7: mod_base = OTHER; note = Nucleotide with phosphorothioate linkage
  modified_base 8: mod_base = OTHER; note = Thymine with phosphorothioate linkage
  modified_base 9: mod_base = OTHER; note = Nucleotide with phosphorothioate linkage
  modified_base 10: mod_base = OTHER; note = Nucleotide with phosphorothioate linkage
  modified_base 11: mod_base = OTHER; note = Nucleotide with phosphorothioate linkage
  modified_base 12: mod_base = OTHER; note = Nucleotide with S-stereo-defined phosphorothioate linkage
  modified_base 13: mod_base = OTHER; note = 5-methylcytosine with phosphorothioate linkage
  modified_base 14: mod_base = OTHER; note = Nucleotide with phosphorothioate linkage
  modified_base 15: mod_base = OTHER; note = Nucleotide with phosphorothioate linkage
  modified_base 16: mod_base = OTHER; note = 2'-O-methoxyethyl modified nucleotide with phosphorothioate linkage
  modified_base 17: mod_base = OTHER; note = 2'-O-methoxyethyl modified nucleotide with phosphorothioate linkage
  modified_base 18: mod_base = OTHER; note = 2'-O-methoxyethyl modified thymine with phosphorothioate linkage
  modified_base 19: mod_base = OTHER; note = 2'-O-methoxyethyl modified nucleotide with phosphorothioate linkage
  modified_base 20: mod_base = OTHER; note = 2'-O-methoxyethyl 5-methylcytosine
  misc_feature 1..5: note = RNA
  misc_feature 6..15: note = DNA
  misc_feature 16..20: note = RNA
gcagaggtgaagcgaagtgc

SEQ ID NO: 108 - DNA, 20 bp, synthetic construct
  source 1..20: mol_type = other DNA
  modified_base 1: mod_base = OTHER; note = 2'-O-methoxyethyl modified nucleotide with phosphorothioate linkage
  modified_base 2: mod_base = OTHER; note = 2'-O-methoxyethyl 5-methylcytosine with phosphorothioate linkage
  modified_base 3: mod_base = OTHER; note = 2'-O-methoxyethyl modified nucleotide with phosphorothioate linkage
  modified_base 4: mod_base = OTHER; note = 2'-O-methoxyethyl modified nucleotide with phosphorothioate linkage
  modified_base 5: mod_base = OTHER; note = 2'-O-methoxyethyl modified nucleotide with phosphorothioate linkage
  modified_base 6: mod_base = OTHER; note = Nucleotide with phosphorothioate linkage
  modified_base 7: mod_base = OTHER; note = Nucleotide with phosphorothioate linkage
  modified_base 8: mod_base = OTHER; note = Thymine with phosphorothioate linkage
  modified_base 9: mod_base = OTHER; note = Nucleotide with phosphorothioate linkage
  modified_base 10: mod_base = OTHER; note = Nucleotide with phosphorothioate linkage
  modified_base 11: mod_base = OTHER; note = Nucleotide with phosphorothioate linkage
  modified_base 12: mod_base = OTHER; note = Nucleotide with phosphorothioate linkage
  modified_base 13: mod_base = OTHER; note = 5-methylcytosine with S-stereo-defined phosphorothioate linkage
  modified_base 14: mod_base = OTHER; note = Nucleotide with phosphorothioate linkage
  modified_base 15: mod_base = OTHER; note = Nucleotide with phosphorothioate linkage
  modified_base 16: mod_base = OTHER; note = 2'-O-methoxyethyl modified nucleotide with phosphorothioate linkage
  modified_base 17: mod_base = OTHER; note = 2'-O-methoxyethyl modified nucleotide with phosphorothioate linkage
  modified_base 18: mod_base = OTHER; note = 2'-O-methoxyethyl modified thymine with phosphorothioate linkage
  modified_base 19: mod_base = OTHER; note = 2'-O-methoxyethyl modified nucleotide with phosphorothioate linkage
  modified_base 20: mod_base = OTHER; note = 2'-O-methoxyethyl 5-methylcytosine
  misc_feature 1..5: note = RNA
  misc_feature 6..15: note = DNA
  misc_feature 16..20: note = RNA
gcagaggtgaagcgaagtgc

SEQ ID NO: 109 - DNA, 20 bp, synthetic construct
  source 1..20: mol_type = other DNA
  modified_base 1: mod_base = OTHER; note = 2'-O-methoxyethyl modified nucleotide with phosphorothioate linkage
  modified_base 2: mod_base = OTHER; note = 2'-O-methoxyethyl 5-methylcytosine with phosphorothioate linkage
  modified_base 3: mod_base = OTHER; note = 2'-O-methoxyethyl modified nucleotide with phosphorothioate linkage
  modified_base 4: mod_base = OTHER; note = 2'-O-methoxyethyl modified nucleotide with phosphorothioate linkage
  modified_base 5: mod_base = OTHER; note = 2'-O-methoxyethyl modified nucleotide with phosphorothioate linkage
  modified_base 6: mod_base = OTHER; note = Nucleotide with phosphorothioate linkage
  modified_base 7: mod_base = OTHER; note = Nucleotide with phosphorothioate linkage
  modified_base 8: mod_base = OTHER; note = Thymine with phosphorothioate linkage
  modified_base 9: mod_base = OTHER; note = Nucleotide with phosphorothioate linkage
  modified_base 10: mod_base = OTHER; note = Nucleotide with phosphorothioate linkage
  modified_base 11: mod_base = OTHER; note = Nucleotide with phosphorothioate linkage
  modified_base 12: mod_base = OTHER; note = Nucleotide with phosphorothioate linkage
  modified_base 13: mod_base = OTHER; note = 5-methylcytosine with phosphorothioate linkage
  modified_base 14: mod_base = OTHER; note = Nucleotide with S-stereo-defined phosphorothioate linkage
  modified_base 15: mod_base = OTHER; note = Nucleotide with phosphorothioate linkage
  modified_base 16: mod_base = OTHER; note = 2'-O-methoxyethyl modified nucleotide with phosphorothioate linkage
  modified_base 17: mod_base = OTHER; note = 2'-O-methoxyethyl modified nucleotide with phosphorothioate linkage
  modified_base 18: mod_base = OTHER; note = 2'-O-methoxyethyl modified thymine with phosphorothioate linkage
  modified_base 19: mod_base = OTHER; note = 2'-O-methoxyethyl modified nucleotide with phosphorothioate linkage
  modified_base 20: mod_base = OTHER; note = 2'-O-methoxyethyl 5-methylcytosine
  misc_feature 1..5: note = RNA
  misc_feature 6..15: note = DNA
  misc_feature 16..20: note = RNA
gcagaggtgaagcgaagtgc

SEQ ID NO: 110 - DNA, 20 bp, synthetic construct
  source 1..20: mol_type = other DNA
  modified_base 1: mod_base = OTHER; note = 2'-O-methoxyethyl 5-methylcytosine with phosphorothioate linkage
  modified_base 2: mod_base = OTHER; note = 2'-O-methoxyethyl modified nucleotide with phosphorothioate linkage
  modified_base 3: mod_base = OTHER; note = 2'-O-methoxyethyl modified nucleotide with phosphorothioate linkage
  modified_base 4: mod_base = OTHER; note = 2'-O-methoxyethyl modified nucleotide with phosphorothioate linkage
  modified_base 5: mod_base = OTHER; note = 2'-O-methoxyethyl modified nucleotide with phosphorothioate linkage
  modified_base 6: mod_base = OTHER; note = 8-amino-guanosine with phosphorothioate linkage
  modified_base 7: mod_base = OTHER; note = Thymine with phosphorothioate linkage
  modified_base 8: mod_base = OTHER; note = Nucleotide with phosphorothioate linkage
  modified_base 9: mod_base = OTHER; note = Nucleotide with phosphorothioate linkage
  modified_base 10: mod_base = OTHER; note = Nucleotide with phosphorothioate linkage
  modified_base 11: mod_base = OTHER; note = Nucleotide with phosphorothioate linkage
  modified_base 12: mod_base = OTHER; note = 5-methylcytosine with phosphorothioate linkage
  modified_base 13: mod_base = OTHER; note = Nucleotide with phosphorothioate linkage
  modified_base 14: mod_base = OTHER; note = Nucleotide with phosphorothioate linkage
  modified_base 15: mod_base = OTHER; note = Nucleotide with phosphorothioate linkage
  modified_base 16: mod_base = OTHER; note = 2'-O-methoxyethyl modified nucleotide with phosphorothioate linkage
  modified_base 17: mod_base = OTHER; note = 2'-O-methoxyethyl modified thymine with phosphorothioate linkage
  modified_base 18: mod_base = OTHER; note = 2'-O-methoxyethyl modified nucleotide with phosphorothioate linkage
  modified_base 19: mod_base = OTHER; note = 2'-O-methoxyethyl 5-methylcytosine with phosphorothioate linkage
  modified_base 20: mod_base = OTHER; note = 2'-O-methoxyethyl modified nucleotide
  misc_feature 1..5: note = RNA
  misc_feature 6..15: note = DNA
  misc_feature 16..20: note = RNA
cagaggtgaagcgaagtgca

SEQ ID NO: 111 - DNA, 20 bp, synthetic construct
  source 1..20: mol_type = other DNA
  modified_base 1: mod_base = OTHER; note = 2'-O-methoxyethyl 5-methylcytosine with phosphorothioate linkage
  modified_base 2: mod_base = OTHER; note = 2'-O-methoxyethyl modified nucleotide with phosphorothioate linkage
  modified_base 3: mod_base = OTHER; note = 2'-O-methoxyethyl modified nucleotide with phosphorothioate linkage
  modified_base 4: mod_base = OTHER; note = 2'-O-methoxyethyl modified nucleotide with phosphorothioate linkage
  modified_base 5: mod_base = OTHER; note = 2'-O-methoxyethyl modified nucleotide with phosphorothioate linkage
  modified_base 6: mod_base = OTHER; note = Nucleotide with phosphorothioate linkage
  modified_base 7: mod_base = OTHER; note = 2-thio-thymine with phosphorothioate linkage
  modified_base 8: mod_base = OTHER; note = Nucleotide with phosphorothioate linkage
  modified_base 9: mod_base = OTHER; note = Nucleotide with phosphorothioate linkage
  modified_base 10: mod_base = OTHER; note = Nucleotide with phosphorothioate linkage
  modified_base 11: mod_base = OTHER; note = Nucleotide with phosphorothioate linkage
  modified_base 12: mod_base = OTHER; note = 5-methylcytosine with phosphorothioate linkage
  modified_base 13: mod_base = OTHER; note = Nucleotide with phosphorothioate linkage
  modified_base 14: mod_base = OTHER; note = Nucleotide with phosphorothioate linkage
  modified_base 15: mod_base = OTHER; note = Nucleotide with phosphorothioate linkage
  modified_base 16: mod_base = OTHER; note = 2'-O-methoxyethyl modified nucleotide with phosphorothioate linkage
  modified_base 17: mod_base = OTHER; note = 2'-O-methoxyethyl modified thymine with phosphorothioate linkage
  modified_base 18: mod_base = OTHER; note = 2'-O-methoxyethyl modified nucleotide with phosphorothioate linkage
  modified_base 19: mod_base = OTHER; note = 2'-O-methoxyethyl 5-methylcytosine with phosphorothioate linkage
  modified_base 20: mod_base = OTHER; note = 2'-O-methoxyethyl modified nucleotide
  misc_feature 1..5: note = RNA
  misc_feature 6..15: note = DNA
  misc_feature 16..20: note = RNA
cagaggtgaagcgaagtgca

SEQ ID NO: 112 - DNA, 20 bp, synthetic construct
  source 1..20: mol_type = other DNA
  modified_base 1: mod_base = OTHER; note = 2'-O-methoxyethyl 5-methylcytosine with phosphorothioate linkage
  modified_base 2: mod_base = OTHER; note = 2'-O-methoxyethyl modified nucleotide with phosphorothioate linkage
  modified_base 3: mod_base = OTHER; note = 2'-O-methoxyethyl modified nucleotide with phosphorothioate linkage
  modified_base 4: mod_base = OTHER; note = 2'-O-methoxyethyl modified nucleotide with phosphorothioate linkage
  modified_base 5: mod_base = OTHER; note = 2'-O-methoxyethyl modified nucleotide with phosphorothioate linkage
  modified_base 6: mod_base = OTHER; note = Nucleotide with phosphorothioate linkage
  modified_base 7: mod_base = OTHER; note = Thymine with phosphorothioate linkage
  modified_base 8: mod_base = OTHER; note = 8-amino-guanosine with phosphorothioate linkage
  modified_base 9: mod_base = OTHER; note = Nucleotide with phosphorothioate linkage
  modified_base 10: mod_base = OTHER; note = Nucleotide with phosphorothioate linkage
  modified_base 11: mod_base = OTHER; note = Nucleotide with phosphorothioate linkage
  modified_base 12: mod_base = OTHER; note = 5-methylcytosine with phosphorothioate linkage
  modified_base 13: mod_base = OTHER; note = Nucleotide with phosphorothioate linkage
  modified_base 14: mod_base = OTHER; note = Nucleotide with phosphorothioate linkage
  modified_base 15: mod_base = OTHER; note = Nucleotide with phosphorothioate linkage
  modified_base 16: mod_base = OTHER; note = 2'-O-methoxyethyl modified nucleotide with phosphorothioate linkage
  modified_base 17: mod_base = OTHER; note = 2'-O-methoxyethyl modified thymine with phosphorothioate linkage
  modified_base 18: mod_base = OTHER; note = 2'-O-methoxyethyl modified nucleotide with phosphorothioate linkage
  modified_base 19: mod_base = OTHER; note = 2'-O-methoxyethyl 5-methylcytosine with phosphorothioate linkage
  modified_base 20: mod_base = OTHER; note = 2'-O-methoxyethyl modified nucleotide
  misc_feature 1..5: note = RNA
  misc_feature 6..15: note = DNA
  misc_feature 16..20: note = RNA
cagaggtgaagcgaagtgca

SEQ ID NO: 113 - DNA, 20 bp, synthetic construct
  source 1..20: mol_type = other DNA
  modified_base 1: mod_base = OTHER; note = 2'-O-methoxyethyl 5-methylcytosine with phosphorothioate linkage
  modified_base 2: mod_base = OTHER; note = 2'-O-methoxyethyl modified nucleotide with phosphorothioate linkage
  modified_base 3: mod_base = OTHER; note = 2'-O-methoxyethyl modified nucleotide with phosphorothioate linkage
  modified_base 4: mod_base = OTHER; note = 2'-O-methoxyethyl modified nucleotide with phosphorothioate linkage
  modified_base 5: mod_base = OTHER; note = 2'-O-methoxyethyl modified nucleotide with phosphorothioate linkage
  modified_base 6: mod_base = OTHER; note = Nucleotide with phosphorothioate linkage
  modified_base 7: mod_base = OTHER; note = Thymine with phosphorothioate linkage
  modified_base 8: mod_base = OTHER; note = Nucleotide with phosphorothioate linkage
  modified_base 9: mod_base = OTHER; note = 8-amino-adenosine with phosphorothioate linkage
  modified_base 10: mod_base = OTHER; note = Nucleotide with phosphorothioate linkage
  modified_base 11: mod_base = OTHER; note = Nucleotide with phosphorothioate linkage
  modified_base 12: mod_base = OTHER; note = 5-methylcytosine with phosphorothioate linkage
  modified_base 13: mod_base = OTHER; note = Nucleotide with phosphorothioate linkage
  modified_base 14: mod_base = OTHER; note = Nucleotide with phosphorothioate linkage
  modified_base 15: mod_base = OTHER; note = Nucleotide with phosphorothioate linkage
  modified_base 16: mod_base = OTHER; note = 2'-O-methoxyethyl modified nucleotide with phosphorothioate linkage
  modified_base 17: mod_base = OTHER; note = 2'-O-methoxyethyl modified thymine with phosphorothioate linkage
  modified_base 18: mod_base = OTHER; note = 2'-O-methoxyethyl modified nucleotide with phosphorothioate linkage
  modified_base 19: mod_base = OTHER; note = 2'-O-methoxyethyl 5-methylcytosine with phosphorothioate linkage
  modified_base 20: mod_base = OTHER; note = 2'-O-methoxyethyl modified nucleotide
  misc_feature 1..5: note = RNA
  misc_feature 6..15: note = DNA
  misc_feature 16..20: note = RNA
cagaggtgaagcgaagtgca

SEQ ID NO: 114 - DNA, 20 bp, synthetic construct
  source 1..20: mol_type = other DNA
  modified_base 1: mod_base = OTHER; note = 2'-O-methoxyethyl 5-methylcytosine with phosphorothioate linkage
  modified_base 2: mod_base = OTHER; note = 2'-O-methoxyethyl modified nucleotide with phosphorothioate linkage
  modified_base 3: mod_base = OTHER; note = 2'-O-methoxyethyl modified nucleotide with phosphorothioate linkage
  modified_base 4: mod_base = OTHER; note = 2'-O-methoxyethyl modified nucleotide with phosphorothioate linkage
  modified_base 5: mod_base = OTHER; note = 2'-O-methoxyethyl modified nucleotide with phosphorothioate linkage
  modified_base 6: mod_base = OTHER; note = Nucleotide with phosphorothioate linkage
  modified_base 7: mod_base = OTHER; note = Thymine with phosphorothioate linkage
  modified_base 8: mod_base = OTHER; note = Nucleotide with phosphorothioate linkage
  modified_base 9: mod_base = OTHER; note = Nucleotide with phosphorothioate linkage
  modified_base 10: mod_base = OTHER; note = 8-amino-adenosine with phosphorothioate linkage
  modified_base 11: mod_base = OTHER; note = Nucleotide with phosphorothioate linkage
  modified_base 12: mod_base = OTHER; note = 5-methylcytosine with phosphorothioate linkage
  modified_base 13: mod_base = OTHER; note = Nucleotide with phosphorothioate linkage
  modified_base 14: mod_base = OTHER; note = Nucleotide with phosphorothioate linkage
  modified_base 15: mod_base = OTHER; note = Nucleotide with phosphorothioate linkage
  modified_base 16: mod_base = OTHER; note = 2'-O-methoxyethyl modified nucleotide with phosphorothioate linkage
  modified_base 17: mod_base = OTHER; note = 2'-O-methoxyethyl modified thymine with phosphorothioate linkage
  modified_base 18: mod_base = OTHER; note = 2'-O-methoxyethyl modified nucleotide with phosphorothioate linkage
  modified_base 19: mod_base = OTHER; note = 2'-O-methoxyethyl 5-methylcytosine with phosphorothioate linkage
  modified_base 20: mod_base = OTHER; note = 2'-O-methoxyethyl modified nucleotide
  misc_feature 1..5: note = RNA
  misc_feature 6..15: note = DNA
  misc_feature 16..20: note = RNA
cagaggtgaagcgaagtgca

SEQ ID NO: 115 - DNA, 20 bp, synthetic construct
  source 1..20: mol_type = other DNA
  modified_base 1: mod_base = OTHER; note = 2'-O-methoxyethyl 5-methylcytosine with phosphorothioate linkage
  modified_base 2: mod_base = OTHER; note = 2'-O-methoxyethyl modified nucleotide with phosphorothioate linkage
  modified_base 3: mod_base = OTHER; note = 2'-O-methoxyethyl modified nucleotide with phosphorothioate linkage
  modified_base 4: mod_base = OTHER; note = 2'-O-methoxyethyl modified nucleotide with phosphorothioate linkage
  modified_base 5: mod_base = OTHER; note = 2'-O-methoxyethyl modified nucleotide with phosphorothioate linkage
  modified_base 6: mod_base = OTHER; note = Nucleotide with phosphorothioate linkage
  modified_base 7: mod_base = OTHER; note = Thymine with phosphorothioate linkage
  modified_base 8: mod_base = OTHER; note = Nucleotide with phosphorothioate linkage
  modified_base 9: mod_base = OTHER; note = Nucleotide with phosphorothioate linkage
  modified_base 10: mod_base = OTHER; note = Nucleotide with phosphorothioate linkage
  modified_base 11: mod_base = OTHER; note = 8-amino-guanosine with phosphorothioate linkage
  modified_base 12: mod_base = OTHER; note = 5-methylcytosine with phosphorothioate linkage
  modified_base 13: mod_base = OTHER; note = Nucleotide with phosphorothioate linkage
  modified_base 14: mod_base = OTHER; note = Nucleotide with phosphorothioate linkage
  modified_base 15: mod_base = OTHER; note = Nucleotide with phosphorothioate linkage
  modified_base 16: mod_base = OTHER; note = 2'-O-methoxyethyl modified nucleotide with phosphorothioate linkage
  modified_base 17: mod_base = OTHER; note = 2'-O-methoxyethyl modified thymine with phosphorothioate linkage
  modified_base 18: mod_base = OTHER; note = 2'-O-methoxyethyl modified nucleotide with phosphorothioate linkage
  modified_base 19: mod_base = OTHER; note = 2'-O-methoxyethyl 5-methylcytosine with phosphorothioate linkage
  modified_base 20: mod_base = OTHER; note = 2'-O-methoxyethyl modified nucleotide
  misc_feature 1..5: note = RNA
  misc_feature 6..15: note = DNA
  misc_feature 16..20: note = RNA
cagaggtgaagcgaagtgca

SEQ ID NO: 116 - DNA, 20 bp, synthetic construct
  source 1..20: mol_type = other DNA
  modified_base 1: mod_base = OTHER; note = 2'-O-methoxyethyl 5-methylcytosine with phosphorothioate linkage
  modified_base 2: mod_base = OTHER; note = 2'-O-methoxyethyl modified nucleotide with phosphorothioate linkage
  modified_base 3: mod_base = OTHER; note = 2'-O-methoxyethyl modified nucleotide with phosphorothioate linkage
  modified_base 4: mod_base = OTHER; note = 2'-O-methoxyethyl modified nucleotide with phosphorothioate linkage
  modified_base 5: mod_base = OTHER; note = 2'-O-methoxyethyl modified nucleotide with phosphorothioate linkage
  modified_base 6: mod_base = OTHER; note = Nucleotide with phosphorothioate linkage
  modified_base 7: mod_base = OTHER; note = Thymine with phosphorothioate linkage
  modified_base 8: mod_base = OTHER; note = Nucleotide with phosphorothioate linkage
  modified_base 9: mod_base = OTHER; note = Nucleotide with phosphorothioate linkage
  modified_base 10: mod_base = OTHER; note = Nucleotide with phosphorothioate linkage
  modified_base 11: mod_base = OTHER; note = Nucleotide with phosphorothioate linkage
  modified_base 12: mod_base = OTHER; note = 5'-hydroxy-cytosine with phosphorothioate linkage
  modified_base 13: mod_base = OTHER; note = Nucleotide with phosphorothioate linkage
  modified_base 14: mod_base = OTHER; note = Nucleotide with phosphorothioate linkage
  modified_base 15: mod_base = OTHER; note = Nucleotide with phosphorothioate linkage
  modified_base 16: mod_base = OTHER; note = 2'-O-methoxyethyl modified nucleotide with phosphorothioate linkage
  modified_base 17: mod_base = OTHER; note = 2'-O-methoxyethyl modified thymine with phosphorothioate linkage
  modified_base 18: mod_base = OTHER; note = 2'-O-methoxyethyl modified nucleotide with phosphorothioate linkage
  modified_base 19: mod_base = OTHER; note = 2'-O-methoxyethyl 5-methylcytosine with phosphorothioate linkage
  modified_base 20: mod_base = OTHER; note = 2'-O-methoxyethyl modified nucleotide
  misc_feature 1..5: note = RNA
  misc_feature 6..15: note = DNA
  misc_feature 16..20: note = RNA
cagaggtgaagcgaagtgca

SEQ ID NO: 117 - DNA, 20 bp, synthetic construct
  source 1..20: mol_type = other DNA
  modified_base 1: mod_base = OTHER; note = 2'-O-methoxyethyl 5-methylcytosine with phosphorothioate linkage
  modified_base 2: mod_base = OTHER; note = 2'-O-methoxyethyl modified nucleotide with phosphorothioate linkage
  modified_base 3: mod_base = OTHER; note = 2'-O-methoxyethyl modified nucleotide with phosphorothioate linkage
  modified_base 4: mod_base = OTHER; note = 2'-O-methoxyethyl modified nucleotide with phosphorothioate linkage
  modified_base 5: mod_base = OTHER; note = 2'-O-methoxyethyl modified nucleotide with phosphorothioate linkage
  modified_base 6: mod_base = OTHER; note = Nucleotide with phosphorothioate linkage
  modified_base 7: mod_base = OTHER; note = Thymine with phosphorothioate linkage
  modified_base 8: mod_base = OTHER; note = Nucleotide with phosphorothioate linkage
  modified_base 9: mod_base = OTHER; note = Nucleotide with phosphorothioate linkage
  modified_base 10: mod_base = OTHER; note = Nucleotide with phosphorothioate linkage
  modified_base 11: mod_base = OTHER; note = Nucleotide with phosphorothioate linkage
  modified_base 12: mod_base = OTHER; note = 5-methylcytosine with phosphorothioate linkage
  modified_base 13: mod_base = OTHER; note = 8-amino-guanosine with phosphorothioate linkage
  modified_base 14: mod_base = OTHER; note = Nucleotide with phosphorothioate linkage
  modified_base 15: mod_base = OTHER; note = Nucleotide with phosphorothioate linkage
  modified_base 16: mod_base = OTHER; note = 2'-O-methoxyethyl modified nucleotide with phosphorothioate linkage
  modified_base 17: mod_base = OTHER; note = 2'-O-methoxyethyl modified thymine with phosphorothioate linkage
  modified_base 18: mod_base = OTHER; note = 2'-O-methoxyethyl modified nucleotide with phosphorothioate linkage
  modified_base 19: mod_base = OTHER; note = 2'-O-methoxyethyl 5-methylcytosine with phosphorothioate linkage
  modified_base 20: mod_base = OTHER; note = 2'-O-methoxyethyl modified nucleotide
  misc_feature 1..5: note = RNA
  misc_feature 6..15: note = DNA
  misc_feature 16..20: note = RNA
cagaggtgaagcgaagtgca

SEQ ID NO: 118 - DNA, 20 bp, synthetic construct
  source 1..20: mol_type = other DNA
  modified_base 1: mod_base = OTHER; note = 2'-O-methoxyethyl 5-methylcytosine with phosphorothioate linkage
  modified_base 2: mod_base = OTHER; note = 2'-O-methoxyethyl modified nucleotide with phosphorothioate linkage
  modified_base 3: mod_base = OTHER; note = 2'-O-methoxyethyl modified nucleotide with phosphorothioate linkage
  modified_base 4: mod_base = OTHER; note = 2'-O-methoxyethyl modified nucleotide with phosphorothioate linkage
  modified_base 5: mod_base = OTHER; note = 2'-O-methoxyethyl modified nucleotide with phosphorothioate linkage
  modified_base 6: mod_base = OTHER; note = Nucleotide with phosphorothioate linkage
  modified_base 7: mod_base = OTHER; note = Thymine with phosphorothioate linkage
  modified_base 8: mod_base = OTHER; note = Nucleotide with phosphorothioate linkage
  modified_base 9: mod_base = OTHER; note = Nucleotide with phosphorothioate linkage
  modified_base 10: mod_base = OTHER; note = Nucleotide with phosphorothioate linkage
  modified_base 11: mod_base = OTHER; note = Nucleotide with phosphorothioate linkage
  modified_base 12: mod_base = OTHER; note = 5-methylcytosine with phosphorothioate linkage
  modified_base 13: mod_base = OTHER; note = Nucleotide with phosphorothioate linkage
  modified_base 14: mod_base = OTHER; note = 8-amino-adenosine with phosphorothioate linkage
  modified_base 15: mod_base = OTHER; note = Nucleotide with phosphorothioate linkage
  modified_base 16: mod_base = OTHER; note = 2'-O-methoxyethyl modified nucleotide with phosphorothioate linkage
  modified_base 17: mod_base = OTHER; note = 2'-O-methoxyethyl modified thymine with phosphorothioate linkage
  modified_base 18: mod_base = OTHER; note = 2'-O-methoxyethyl modified nucleotide with phosphorothioate linkage
  modified_base 19: mod_base = OTHER; note = 2'-O-methoxyethyl 5-methylcytosine with phosphorothioate linkage
  modified_base 20: mod_base = OTHER; note = 2'-O-methoxyethyl modified nucleotide
  misc_feature 1..5: note = RNA
  misc_feature 6..15: note = DNA
  misc_feature 16..20: note = RNA
cagaggtgaagcgaagtgca

SEQ ID NO: 119 - DNA, 20 bp, synthetic construct
  source 1..20: mol_type = other DNA
  modified_base 1: mod_base = OTHER; note = 2'-O-methoxyethyl 5-methylcytosine with phosphorothioate linkage
  modified_base 2: mod_base = OTHER; note = 2'-O-methoxyethyl modified nucleotide with phosphorothioate linkage
  modified_base 3: mod_base = OTHER; note = 2'-O-methoxyethyl modified nucleotide with phosphorothioate linkage
  modified_base 4: mod_base = OTHER; note = 2'-O-methoxyethyl modified nucleotide with phosphorothioate linkage
  modified_base 5: mod_base = OTHER; note = 2'-O-methoxyethyl modified nucleotide with phosphorothioate linkage
  modified_base 6: mod_base = OTHER; note = Nucleotide with phosphorothioate linkage
  modified_base 7: mod_base = OTHER; note = Thymine with phosphorothioate linkage
  modified_base 8: mod_base = OTHER; note = Nucleotide with phosphorothioate linkage
  modified_base 9: mod_base = OTHER; note = Nucleotide with phosphorothioate linkage
  modified_base 10: mod_base = OTHER; note = Nucleotide with phosphorothioate linkage
  modified_base 11: mod_base = OTHER; note = Nucleotide with phosphorothioate linkage
  modified_base 12: mod_base = OTHER; note = 5-methylcytosine with phosphorothioate linkage
  modified_base 13: mod_base = OTHER; note = Nucleotide with phosphorothioate linkage
  modified_base 14: mod_base = OTHER; note = Nucleotide with phosphorothioate linkage
  modified_base 15: mod_base = OTHER; note = 8-amino-adenosine with phosphorothioate linkage
  modified_base 16: mod_base = OTHER; note = 2'-O-methoxyethyl modified nucleotide with phosphorothioate linkage
  modified_base 17: mod_base = OTHER; note = 2'-O-methoxyethyl modified thymine with phosphorothioate linkage
  modified_base 18: mod_base = OTHER; note = 2'-O-methoxyethyl modified nucleotide with phosphorothioate linkage
  modified_base 19: mod_base = OTHER; note = 2'-O-methoxyethyl 5-methylcytosine with phosphorothioate linkage
  modified_base 20: mod_base = OTHER; note = 2'-O-methoxyethyl modified nucleotide
  misc_feature 1..5: note = RNA
  misc_feature 6..15: note = DNA
  misc_feature 16..20: note = RNA
cagaggtgaagcgaagtgca

SEQ ID NO: 120 - DNA, 19 bp, synthetic construct
  source 1..19: mol_type = other DNA
  modified_base 1: mod_base = OTHER; note = 2'-O-methoxyethyl 5-methylcytosine with phosphorothioate linkage
  modified_base 2: mod_base = OTHER; note = 2'-O-methoxyethyl modified nucleotide with phosphorothioate linkage
  modified_base 3: mod_base = OTHER; note = 2'-O-methoxyethyl modified nucleotide with phosphorothioate linkage
  modified_base 4: mod_base = OTHER; note = 2'-O-methoxyethyl modified nucleotide with phosphorothioate linkage
  modified_base 5: mod_base = OTHER; note = Nucleotide with phosphorothioate linkage
  modified_base 6: mod_base = OTHER; note = Nucleotide with phosphorothioate linkage
  modified_base 7: mod_base = OTHER; note = Thymine with phosphorothioate linkage
  modified_base 8: mod_base = OTHER; note = Nucleotide with phosphorothioate linkage
  modified_base 9: mod_base = OTHER; note = Nucleotide with phosphorothioate linkage
  modified_base 10: mod_base = OTHER; note = Nucleotide with phosphorothioate linkage
  modified_base 11: mod_base = OTHER; note = Nucleotide with phosphorothioate linkage
  modified_base 12: mod_base = OTHER; note = 5-methylcytosine with phosphorothioate linkage
  modified_base 13: mod_base = OTHER; note = Nucleotide with phosphorothioate linkage
  modified_base 14: mod_base = OTHER; note = Nucleotide with phosphorothioate linkage
  modified_base 15: mod_base = OTHER; note = 2'-O-methoxyethyl modified nucleotide with phosphorothioate linkage
  modified_base 16: mod_base = OTHER; note = 2'-O-methoxyethyl modified nucleotide with phosphorothioate linkage
  modified_base 17: mod_base = OTHER; note = 2'-O-methoxyethyl modified thymine with phosphorothioate linkage
  modified_base 18: mod_base = OTHER; note = 2'-O-methoxyethyl modified nucleotide with phosphorothioate linkage
  modified_base 19: mod_base = OTHER; note = 2'-O-methoxyethyl 5-methylcytosine
  misc_feature 1..4: note = RNA
  misc_feature 5..14: note = DNA
  misc_feature 15..19: note = RNA
cagaggtgaagcgaagtgc

SEQ ID NO: 121 - DNA, 19 bp, synthetic construct
  source 1..19: mol_type = other DNA
  modified_base 1: mod_base = OTHER; note = 2'-O-methoxyethyl modified nucleotide with phosphorothioate linkage
  modified_base 2: mod_base = OTHER; note = 2'-O-methoxyethyl 5-methylcytosine with phosphorothioate linkage
  modified_base 3: mod_base = OTHER; note = 2'-O-methoxyethyl modified nucleotide with phosphorothioate linkage
  modified_base 4: mod_base = OTHER; note = 2'-O-methoxyethyl modified nucleotide with phosphorothioate linkage
  modified_base 5: mod_base = OTHER; note = 2'-O-methoxyethyl modified nucleotide with phosphorothioate linkage
  modified_base 6: mod_base = OTHER; note = Nucleotide with phosphorothioate linkage
  modified_base 7: mod_base = OTHER; note = Nucleotide with phosphorothioate linkage
  modified_base 8: mod_base = OTHER; note = Thymine with phosphorothioate linkage
  modified_base 9: mod_base = OTHER; note = Nucleotide with phosphorothioate linkage
  modified_base 10: mod_base = OTHER; note = Nucleotide with phosphorothioate linkage
  modified_base 11: mod_base = OTHER; note = Nucleotide with phosphorothioate linkage
  modified_base 12: mod_base = OTHER; note = Nucleotide with phosphorothioate linkage
  modified_base 13: mod_base = OTHER; note = 5-methylcytosine with phosphorothioate linkage
  modified_base 14: mod_base = OTHER; note = Nucleotide with phosphorothioate linkage
  modified_base 15: mod_base = OTHER; note = Nucleotide with phosphorothioate linkage
  modified_base 16: mod_base = OTHER; note = 2'-O-methoxyethyl modified nucleotide with phosphorothioate linkage
  modified_base 17: mod_base = OTHER; note = 2'-O-methoxyethyl modified nucleotide with phosphorothioate linkage
  modified_base 18: mod_base = OTHER; note = 2'-O-methoxyethyl modified thymine with phosphorothioate linkage
  modified_base 19: mod_base = OTHER; note = 2'-O-methoxyethyl modified nucleotide
  misc_feature 1..5: note = RNA
  misc_feature 6..15: note = DNA
  misc_feature 16..19: note = RNA
gcagaggtgaagcgaagtg

SEQ ID NO: 122 - DNA, 20 bp, synthetic construct
  source 1..20: mol_type = other DNA
  modified_base 1: mod_base = OTHER; note = Nucleotide with phosphorothioate linkage
  modified_base 2: mod_base = OTHER; note = 2'-O-methoxyethyl 5-methylcytosine with phosphorothioate linkage
  modified_base 3: mod_base = OTHER; note = 2'-O-methoxyethyl modified nucleotide with phosphorothioate linkage
  modified_base 4: mod_base = OTHER; note = 2'-O-methoxyethyl modified nucleotide with phosphorothioate linkage
  modified_base 5: mod_base = OTHER; note = 2'-O-methoxyethyl modified nucleotide with phosphorothioate linkage
  modified_base 6: mod_base = OTHER; note = Nucleotide with phosphorothioate linkage
  modified_base 7: mod_base = OTHER; note = Nucleotide with phosphorothioate linkage
  modified_base 8: mod_base = OTHER; note = Thymine with phosphorothioate linkage
  modified_base 9: mod_base = OTHER; note = Nucleotide with phosphorothioate linkage
  modified_base 10: mod_base = OTHER; note = Nucleotide with phosphorothioate linkage
  modified_base 11: mod_base = OTHER; note = Nucleotide with phosphorothioate linkage
  modified_base 12: mod_base = OTHER; note = Nucleotide with phosphorothioate linkage
  modified_base 13: mod_base = OTHER; note = 5-methylcytosine with phosphorothioate linkage
  modified_base 14: mod_base = OTHER; note = Nucleotide with phosphorothioate linkage
  modified_base 15: mod_base = OTHER; note = Nucleotide with phosphorothioate linkage
  modified_base 16: mod_base = OTHER; note = 2'-O-methoxyethyl modified nucleotide with phosphorothioate linkage
  modified_base 17: mod_base = OTHER; note = 2'-O-methoxyethyl modified nucleotide with phosphorothioate linkage
  modified_base 18: mod_base = OTHER; note = 2'-O-methoxyethyl modified thymine with phosphorothioate linkage
  modified_base 19: mod_base = OTHER; note = 2'-O-methoxyethyl modified nucleotide with phosphorothioate linkage
  modified_base 20: mod_base = OTHER; note = 2'-O-methoxyethyl 5-methylcytosine
  misc_feature 1..5: note = RNA
  misc_feature 6..15: note = DNA
  misc_feature 16..20: note = RNA
gcagaggtgaagcgaagtgc

SEQ ID NO: 123 - DNA, 20 bp, synthetic construct
  source 1..20: mol_type = other DNA
  modified_base 1: mod_base = OTHER; note = 2'-O-methoxyethyl modified nucleotide with phosphorothioate linkage
  modified_base 2: mod_base = OTHER; note = 2'-O-methoxyethyl 5-methylcytosine with phosphorothioate linkage
  modified_base 3: mod_base = OTHER; note = 2'-O-methoxyethyl modified nucleotide with phosphorothioate linkage
  modified_base 4: mod_base = OTHER; note = Nucleotide with phosphorothioate linkage
  modified_base 5: mod_base = OTHER; note = 2'-O-methoxyethyl modified nucleotide with phosphorothioate linkage
  modified_base 6: mod_base = OTHER; note = Nucleotide with phosphorothioate linkage
  modified_base 7: mod_base = OTHER; note = Nucleotide with phosphorothioate linkage
  modified_base 8: mod_base = OTHER; note = Thymine with phosphorothioate linkage
  modified_base 9: mod_base = OTHER; note = Nucleotide with phosphorothioate linkage
  modified_base 10: mod_base = OTHER; note = Nucleotide with phosphorothioate linkage
  modified_base 11: mod_base = OTHER; note = Nucleotide with phosphorothioate linkage
  modified_base 12: mod_base = OTHER; note = Nucleotide with phosphorothioate linkage
  modified_base 13: mod_base = OTHER; note = 5-methylcytosine with phosphorothioate linkage
  modified_base 14: mod_base = OTHER; note = Nucleotide with phosphorothioate linkage
  modified_base 15: mod_base = OTHER; note = Nucleotide with phosphorothioate linkage
  modified_base 16: mod_base = OTHER; note = 2'-O-methoxyethyl modified nucleotide with phosphorothioate linkage
  modified_base 17: mod_base = OTHER; note = 2'-O-methoxyethyl modified nucleotide with phosphorothioate linkage
  modified_base 18: mod_base = OTHER; note = 2'-O-methoxyethyl modified thymine with phosphorothioate linkage
  modified_base 19: mod_base = OTHER; note = 2'-O-methoxyethyl modified nucleotide with phosphorothioate linkage
  modified_base 20: mod_base = OTHER; note = 2'-O-methoxyethyl 5-methylcytosine
  misc_feature 1..5: note = RNA
  misc_feature 6..15: note = DNA
  misc_feature 16..20: note = RNA
gcagaggtgaagcgaagtgc

SEQ ID NO: 124 - DNA, 20 bp, synthetic construct
  source 1..20: mol_type = other DNA
  modified_base 1: mod_base = OTHER; note = 2'-O-methoxyethyl modified nucleotide with phosphorothioate linkage
  modified_base 2: mod_base = OTHER; note = 2'-O-methoxyethyl 5-methylcytosine with phosphorothioate linkage
  modified_base 3: mod_base = OTHER; note = 2'-O-methoxyethyl modified nucleotide with phosphorothioate linkage
  modified_base 4: mod_base = OTHER; note = 2'-O-methoxyethyl modified nucleotide with phosphorothioate linkage
  modified_base 5: mod_base = OTHER; note = Nucleotide with phosphorothioate linkage
  modified_base 6: mod_base = OTHER; note = Nucleotide with phosphorothioate linkage
  modified_base 7: mod_base = OTHER; note = Nucleotide with phosphorothioate linkage
  modified_base 8: mod_base = OTHER; note = Thymine with phosphorothioate linkage
  modified_base 9: mod_base = OTHER; note = Nucleotide with phosphorothioate linkage
  modified_base 10: mod_base = OTHER; note = Nucleotide with phosphorothioate linkage
  modified_base 11: mod_base = OTHER; note = Nucleotide with phosphorothioate linkage
  modified_base 12: mod_base = OTHER; note = Nucleotide with phosphorothioate linkage
  modified_base 13: mod_base = OTHER; note = 5-methylcytosine with phosphorothioate linkage
  modified_base 14: mod_base = OTHER; note = Nucleotide with phosphorothioate linkage
  modified_base 15: mod_base = OTHER; note = Nucleotide with phosphorothioate linkage
  modified_base 16: mod_base = OTHER; note = 2'-O-methoxyethyl modified nucleotide with phosphorothioate linkage
  modified_base 17: mod_base = OTHER; note = 2'-O-methoxyethyl modified nucleotide with phosphorothioate linkage
  modified_base 18: mod_base = OTHER; note = 2'-O-methoxyethyl modified thymine with phosphorothioate linkage
  modified_base 19: mod_base = OTHER; note = 2'-O-methoxyethyl modified nucleotide with phosphorothioate linkage
  modified_base 20: mod_base = OTHER; note = 2'-O-methoxyethyl 5-methylcytosine
  misc_feature 1..5: note = RNA
  misc_feature 6..15: note = DNA
  misc_feature 16..20: note = RNA
gcagaggtgaagcgaagtgc

SEQ ID NO: 125 - DNA, 20 bp, synthetic construct
  source 1..20: mol_type = other DNA
  modified_base 1: mod_base = OTHER; note = 2'-O-methoxyethyl modified nucleotide with phosphorothioate linkage
  modified_base 2: mod_base = OTHER; note = 2'-O-methoxyethyl 5-methylcytosine with phosphorothioate linkage
  modified_base 3: mod_base = OTHER; note = 2'-O-methoxyethyl modified nucleotide with phosphorothioate linkage
  modified_base 4: mod_base = OTHER; note = 2'-O-methoxyethyl modified nucleotide with phosphorothioate linkage
  modified_base 5: mod_base = OTHER; note = 2'-O-methoxyethyl modified nucleotide with phosphorothioate linkage
  modified_base 6: mod_base = OTHER; note = Nucleotide with phosphorothioate linkage
  modified_base 7: mod_base = OTHER; note = Nucleotide with phosphorothioate linkage
  modified_base 8: mod_base = OTHER; note = Thymine with phosphorothioate linkage
  modified_base 9: mod_base = OTHER; note = Nucleotide with phosphorothioate linkage
  modified_base 10: mod_base = OTHER; note = Nucleotide with phosphorothioate linkage
  modified_base 11: mod_base = OTHER; note = Nucleotide with phosphorothioate linkage
  modified_base 12: mod_base = OTHER; note = Nucleotide with phosphorothioate linkage
  modified_base 13: mod_base = OTHER; note = 5-methylcytosine with phosphorothioate linkage
  modified_base 14: mod_base = OTHER; note = Nucleotide with phosphorothioate linkage
  modified_base 15: mod_base = OTHER; note = Nucleotide with phosphorothioate linkage
  modified_base 16: mod_base = OTHER; note = 2'-O-methoxyethyl modified nucleotide with phosphorothioate linkage
  modified_base 17: mod_base = OTHER; note = Nucleotide with phosphorothioate linkage
  modified_base 18: mod_base = OTHER; note = 2'-O-methoxyethyl modified thymine with phosphorothioate linkage
  modified_base 19: mod_base = OTHER; note = 2'-O-methoxyethyl modified nucleotide with phosphorothioate linkage
  modified_base 20: mod_base = OTHER; note = 2'-O-methoxyethyl 5-methylcytosine
  misc_feature 1..5: note = RNA
  misc_feature 6..15: note = DNA
  misc_feature 16..20: note = RNA
gcagaggtgaagcgaagtgc

SEQ ID NO: 126 - DNA, 20 bp, synthetic construct
  source 1..20: mol_type = other DNA
  modified_base 1: mod_base = OTHER; note = 2'-O-methoxyethyl modified nucleotide with phosphorothioate linkage
  modified_base 2: mod_base = OTHER; note = 2'-O-methoxyethyl 5-methylcytosine with phosphorothioate linkage
  modified_base 3: mod_base = OTHER; note = 2'-O-methoxyethyl modified nucleotide with phosphorothioate linkage
  modified_base 4: mod_base = OTHER; note = 2'-O-methoxyethyl modified nucleotide with phosphorothioate linkage
  modified_base 5: mod_base = OTHER; note = 2'-O-methoxyethyl modified nucleotide with phosphorothioate linkage
  modified_base 6: mod_base = OTHER; note = Nucleotide with phosphorothioate linkage
  modified_base 7: mod_base = OTHER; note = Nucleotide with phosphorothioate linkage
  modified_base 8: mod_base = OTHER; note = Thymine with phosphorothioate linkage
  modified_base 9: mod_base = OTHER; note = Nucleotide with phosphorothioate linkage
  modified_base 10: mod_base = OTHER; note = Nucleotide with phosphorothioate linkage
  modified_base 11: mod_base = OTHER; note = Nucleotide with phosphorothioate linkage
  modified_base 12: mod_base = OTHER; note = Nucleotide with phosphorothioate linkage
  modified_base 13: mod_base = OTHER; note = 5-methylcytosine with phosphorothioate linkage
  modified_base 14: mod_base = OTHER; note = Nucleotide with phosphorothioate linkage
  modified_base 15: mod_base = OTHER; note = Nucleotide with phosphorothioate linkage
  modified_base 16: mod_base = OTHER; note = 2'-O-methoxyethyl modified nucleotide with phosphorothioate linkage
  modified_base 17: mod_base = OTHER; note = 2'-O-methoxyethyl modified nucleotide with phosphorothioate linkage
  modified_base 18: mod_base = OTHER; note = 2'-O-methoxyethyl modified thymine with phosphorothioate linkage
  modified_base 19: mod_base = OTHER; note = Nucleotide with phosphorothioate linkage
  modified_base 20: mod_base = OTHER; note = 2'-O-methoxyethyl 5-methylcytosine
  misc_feature 1..5: note = RNA
  misc_feature 6..15: note = DNA
  misc_feature 16..20: note = RNA
gcagaggtgaagcgaagtgc

SEQ ID NO: 127 - DNA, 20 bp, synthetic construct
  source 1..20: mol_type = other DNA
  modified_base 1: mod_base = OTHER; note = 2'-O-methoxyethyl modified nucleotide with phosphorothioate linkage
  modified_base 2: mod_base = OTHER; note = 2'-O-methoxyethyl 5-methylcytosine with phosphorothioate linkage
  modified_base 3: mod_base = OTHER; note = 2'-O-methoxyethyl modified nucleotide with phosphorothioate linkage
  modified_base 4: mod_base = OTHER; note = 2'-O-methoxyethyl modified nucleotide with phosphorothioate linkage
  modified_base 5: mod_base = OTHER; note = 2'-O-methoxyethyl modified nucleotide with phosphorothioate linkage
  modified_base 6: mod_base = OTHER; note = Nucleotide with phosphorothioate linkage
  modified_base 7: mod_base = OTHER; note = Nucleotide with phosphorothioate linkage
  modified_base 8: mod_base = OTHER; note = Thymine with phosphorothioate linkage
  modified_base 9: mod_base = OTHER; note = Nucleotide with phosphorothioate linkage
  modified_base 10: mod_base = OTHER; note = Nucleotide with phosphorothioate linkage
  modified_base 11: mod_base = OTHER; note = Nucleotide with phosphorothioate linkage
  modified_base 12: mod_base = OTHER; note = Nucleotide with phosphorothioate linkage
  modified_base 13: mod_base = OTHER; note = 5-methylcytosine with phosphorothioate linkage
  modified_base 14: mod_base = OTHER; note = Nucleotide with phosphorothioate linkage
  modified_base 15: mod_base = OTHER; note = Nucleotide with phosphorothioate linkage
  modified_base 16: mod_base = OTHER; note = Nucleotide with phosphorothioate linkage
  modified_base 17: mod_base = OTHER; note = 2'-O-methoxyethyl modified nucleotide with phosphorothioate linkage
  modified_base 18: mod_base = OTHER; note = 2'-O-methoxyethyl modified thymine with phosphorothioate linkage
  modified_base 19: mod_base = OTHER; note = 2'-O-methoxyethyl modified nucleotide with phosphorothioate linkage
  modified_base 20: mod_base = OTHER; note = 2'-O-methoxyethyl 5-methylcytosine
  misc_feature 1..5: note = RNA
  misc_feature 6..15: note = DNA
  misc_feature 16..20: note = RNA
gcagaggtgaagcgaagtgc

SEQ ID NO: 128 - DNA, 20 bp, synthetic construct
  source 1..20: mol_type = other DNA
  modified_base 1: mod_base = OTHER; note = 2'-O-methoxyethyl modified nucleotide with phosphorothioate linkage
  modified_base 2: mod_base = OTHER; note = 2'-O-methoxyethyl 5-methylcytosine with phosphorothioate linkage
  modified_base 3: mod_base = OTHER; note = Nucleotide with phosphorothioate linkage
  modified_base 4: mod_base = OTHER; note = 2'-O-methoxyethyl modified nucleotide with phosphorothioate linkage
  modified_base 5: mod_base = OTHER; note = 2'-O-methoxyethyl modified nucleotide with phosphorothioate linkage
  modified_base 6: mod_base = OTHER; note = Nucleotide with phosphorothioate linkage
  modified_base 7: mod_base = OTHER; note = Nucleotide with phosphorothioate linkage
  modified_base 8: mod_base = OTHER; note = Thymine with phosphorothioate linkage
  modified_base 9: mod_base = OTHER; note = Nucleotide with phosphorothioate linkage
  modified_base 10: mod_base = OTHER; note = Nucleotide with phosphorothioate linkage
  modified_base 11: mod_base = OTHER; note = Nucleotide with phosphorothioate linkage
  modified_base 12: mod_base = OTHER; note = Nucleotide with phosphorothioate linkage
  modified_base 13: mod_base = OTHER; note = 5-methylcytosine with phosphorothioate linkage
  modified_base 14: mod_base = OTHER; note = Nucleotide with phosphorothioate linkage
  modified_base 15: mod_base = OTHER; note = Nucleotide with phosphorothioate linkage
  modified_base 16: mod_base = OTHER; note = 2'-O-methoxyethyl modified nucleotide with phosphorothioate linkage
  modified_base 17: mod_base = OTHER; note = 2'-O-methoxyethyl modified nucleotide with phosphorothioate linkage
  modified_base 18: mod_base = OTHER; note = 2'-O-methoxyethyl modified thymine with phosphorothioate linkage
  modified_base 19: mod_base = OTHER; note = 2'-O-methoxyethyl modified nucleotide with phosphorothioate linkage
  modified_base 20: mod_base = OTHER; note = 2'-O-methoxyethyl 5-methylcytosine
  misc_feature 1..5: note = RNA
  misc_feature 6..15: note = DNA
  misc_feature 16..20: note = RNA
gcagaggtgaagcgaagtgc

SEQ ID NO: 129 - DNA, 20 bp, synthetic construct
  source 1..20: mol_type = other DNA
  modified_base 1: mod_base = OTHER; note = 2'-O-methoxyethyl modified nucleotide with phosphorothioate linkage
  modified_base 2: mod_base = OTHER; note = 2'-O-methoxyethyl 5-methylcytosine with phosphorothioate linkage
  modified_base 3: mod_base = OTHER; note = 2'-O-methoxyethyl modified nucleotide with phosphorothioate linkage
  modified_base 4: mod_base = OTHER; note = 2'-O-methoxyethyl modified thymine with phosphorothioate linkage
  modified_base 5: mod_base = OTHER; note = 2'-O-methoxyethyl modified nucleotide with phosphorothioate linkage
  modified_base 6: mod_base = OTHER; note = 5'-hydroxy-cytosine with phosphorothioate linkage
  modified_base 7: mod_base = OTHER; note = Nucleotide with phosphorothioate linkage
  modified_base 8: mod_base = OTHER; note = Nucleotide with phosphorothioate linkage
  modified_base 9: mod_base = OTHER; note = Nucleotide with phosphorothioate linkage
  modified_base 10: mod_base = OTHER; note = Nucleotide with phosphorothioate linkage
  modified_base 11: mod_base = OTHER; note = Nucleotide with phosphorothioate linkage
  modified_base 12: mod_base = OTHER; note = Thymine with phosphorothioate linkage
  modified_base 13: mod_base = OTHER; note = Nucleotide with phosphorothioate linkage
  modified_base 14: mod_base = OTHER; note = Nucleotide with phosphorothioate linkage
  modified_base 15: mod_base = OTHER; note = Nucleotide with phosphorothioate linkage
  modified_base 16: mod_base = OTHER; note = 2'-O-methoxyethyl modified nucleotide with phosphorothioate linkage
  modified_base 17: mod_base = OTHER; note = 2'-O-methoxyethyl 5-methylcytosine with phosphorothioate linkage
  modified_base 18: mod_base = OTHER; note = 2'-O-methoxyethyl modified nucleotide with phosphorothioate linkage
  modified_base 19: mod_base = OTHER; note = 2'-O-methoxyethyl modified nucleotide with phosphorothioate linkage
  modified_base 20: mod_base = OTHER; note = 2'-O-methoxyethyl modified nucleotide
  misc_feature 1..5: note = RNA
  misc_feature 6..15: note = DNA
  misc_feature 16..20: note = RNA
acgtgcagaggtgaagcgaa

SEQ ID NO: 130 - DNA, 20 bp, synthetic construct
  source 1..20: mol_type = other DNA
  modified_base 1: mod_base = OTHER; note = 2'-O-methoxyethyl modified nucleotide with phosphorothioate linkage
  modified_base 2: mod_base = OTHER; note = 2'-O-methoxyethyl 5-methylcytosine with phosphorothioate linkage
  modified_base 3: mod_base = OTHER; note = 2'-O-methoxyethyl modified nucleotide with phosphorothioate linkage
  modified_base 4: mod_base = OTHER; note = 2'-O-methoxyethyl modified thymine with phosphorothioate linkage
  modified_base 5: mod_base = OTHER; note = 2'-O-methoxyethyl modified nucleotide with phosphorothioate linkage
  modified_base 6: mod_base = OTHER; note = 5-methylcytosine with phosphorothioate linkage
  modified_base 7: mod_base = OTHER; note = 8-amino-adenosine with phosphorothioate linkage
  modified_base 8: mod_base = OTHER; note = Nucleotide with phosphorothioate linkage
  modified_base 9: mod_base = OTHER; note = Nucleotide with phosphorothioate linkage
  modified_base 10: mod_base = OTHER; note = Nucleotide with phosphorothioate linkage
  modified_base 11: mod_base = OTHER; note = Nucleotide with phosphorothioate linkage
  modified_base 12: mod_base = OTHER; note = Thymine with phosphorothioate linkage
  modified_base 13: mod_base = OTHER; note = Nucleotide with phosphorothioate linkage
  modified_base 14: mod_base = OTHER; note = Nucleotide with phosphorothioate linkage
  modified_base 15: mod_base = OTHER; note = Nucleotide with phosphorothioate linkage
  modified_base 16: mod_base = OTHER; note = 2'-O-methoxyethyl modified nucleotide with phosphorothioate linkage
  modified_base 17: mod_base = OTHER; note = 2'-O-methoxyethyl 5-methylcytosine with phosphorothioate linkage
  modified_base 18: mod_base = OTHER; note = 2'-O-methoxyethyl modified nucleotide with phosphorothioate linkage
  modified_base 19: mod_base = OTHER; note = 2'-O-methoxyethyl modified nucleotide with phosphorothioate linkage
  modified_base 20: mod_base = OTHER; note = 2'-O-methoxyethyl modified nucleotide
  misc_feature 1..5: note = RNA
  misc_feature 6..15: note = DNA
  misc_feature 16..20: note = RNA
acgtgcagaggtgaagcgaa

SEQ ID NO: 131 - DNA, 20 bp, synthetic construct
  source 1..20: mol_type = other DNA
  modified_base 1: mod_base = OTHER; note = 2'-O-methoxyethyl modified nucleotide with phosphorothioate linkage
  modified_base 2: mod_base = OTHER; note = 2'-O-methoxyethyl 5-methylcytosine with phosphorothioate linkage
  modified_base 3: mod_base = OTHER; note = 2'-O-methoxyethyl modified nucleotide with phosphorothioate linkage
  modified_base 4: mod_base = OTHER; note = 2'-O-methoxyethyl modified thymine with phosphorothioate linkage
  modified_base 5: mod_base = OTHER; note = 2'-O-methoxyethyl modified nucleotide with phosphorothioate linkage
  modified_base 6: mod_base = OTHER; note = 5-methylcytosine with phosphorothioate linkage
  modified_base 7: mod_base = OTHER; note = Nucleotide with phosphorothioate linkage
  modified_base 8: mod_base = OTHER; note = 8-amino-guanosine with phosphorothioate linkage
  modified_base 9: mod_base = OTHER; note = Nucleotide with phosphorothioate linkage
  modified_base 10: mod_base = OTHER; note = Nucleotide with phosphorothioate linkage
  modified_base 11: mod_base = OTHER; note = Nucleotide with phosphorothioate linkage
  modified_base 12: mod_base = OTHER; note = Thymine with phosphorothioate linkage
  modified_base 13: mod_base = OTHER; note = Nucleotide with phosphorothioate linkage
  modified_base 14: mod_base = OTHER; note = Nucleotide with phosphorothioate linkage
  modified_base 15: mod_base = OTHER; note = Nucleotide with phosphorothioate linkage
  modified_base 16: mod_base = OTHER; note = 2'-O-methoxyethyl modified nucleotide with phosphorothioate linkage
  modified_base 17: mod_base = OTHER; note = 2'-O-methoxyethyl 5-methylcytosine with phosphorothioate linkage
  modified_base 18: mod_base = OTHER; note = 2'-O-methoxyethyl modified nucleotide with phosphorothioate linkage
  modified_base 19: mod_base = OTHER; note = 2'-O-methoxyethyl modified nucleotide with phosphorothioate linkage
  modified_base 20: mod_base = OTHER; note = 2'-O-methoxyethyl modified nucleotide
  misc_feature 1..5: note = RNA
  misc_feature 6..15: note = DNA
  misc_feature 16..20: note = RNA
acgtgcagaggtgaagcgaa

SEQ ID NO: 132 - DNA, 20 bp, synthetic construct
  source 1..20: mol_type = other DNA
  modified_base 1: mod_base = OTHER; note = 2'-O-methoxyethyl modified nucleotide with phosphorothioate linkage
  modified_base 2: mod_base = OTHER; note = 2'-O-methoxyethyl 5-methylcytosine with phosphorothioate linkage
  modified_base 3: mod_base = OTHER; note = 2'-O-methoxyethyl modified nucleotide with phosphorothioate linkage
  modified_base 4: mod_base = OTHER; note = 2'-O-methoxyethyl modified thymine with phosphorothioate linkage
  modified_base 5: mod_base = OTHER; note = 2'-O-methoxyethyl modified nucleotide with phosphorothioate linkage
  modified_base 6: mod_base = OTHER; note = 5-methylcytosine with phosphorothioate linkage
  modified_base 7: mod_base = OTHER; note = Nucleotide with phosphorothioate linkage
  modified_base 8: mod_base = OTHER; note = Nucleotide with phosphorothioate linkage
  modified_base 9: mod_base = OTHER; note = 8-amino-adenosine with phosphorothioate linkage
  modified_base 10: mod_base = OTHER; note = Nucleotide with phosphorothioate linkage
  modified_base 11: mod_base = OTHER; note = Nucleotide with phosphorothioate linkage
  modified_base 12: mod_base = OTHER; note = Thymine with phosphorothioate linkage
  modified_base 13: mod_base = OTHER; note = Nucleotide with phosphorothioate linkage
  modified_base 14: mod_base = OTHER; note = Nucleotide with phosphorothioate linkage
  modified_base 15: mod_base = OTHER; note = Nucleotide with phosphorothioate linkage
  modified_base 16: mod_base = OTHER; note = 2'-O-methoxyethyl modified nucleotide with phosphorothioate linkage
  modified_base 17: mod_base = OTHER; note = 2'-O-methoxyethyl 5-methylcytosine with phosphorothioate linkage
  modified_base 18: mod_base = OTHER; note = 2'-O-methoxyethyl modified nucleotide with phosphorothioate linkage
  modified_base 19: mod_base = OTHER; note = 2'-O-methoxyethyl modified nucleotide with phosphorothioate linkage
  modified_base 20: mod_base = OTHER; note = 2'-O-methoxyethyl modified nucleotide
  misc_feature 1..5: note = RNA
  misc_feature 6..15: note = DNA
  misc_feature 16..20: note = RNA
acgtgcagaggtgaagcgaa

SEQ ID NO: 133 - DNA, 20 bp, synthetic construct
  source 1..20: mol_type = other DNA
  modified_base 1: mod_base = OTHER; note = 2'-O-methoxyethyl modified nucleotide with phosphorothioate linkage
  modified_base 2: mod_base = OTHER; note = 2'-O-methoxyethyl 5-methylcytosine with phosphorothioate linkage
  modified_base 3: mod_base = OTHER; note = 2'-O-methoxyethyl modified nucleotide with phosphorothioate linkage
  modified_base 4: mod_base = OTHER; note = 2'-O-methoxyethyl modified thymine with phosphorothioate linkage
  modified_base 5: mod_base = OTHER; note = 2'-O-methoxyethyl modified nucleotide with phosphorothioate linkage
  modified_base 6: mod_base = OTHER; note = 5-methylcytosine with phosphorothioate linkage
  modified_base 7: mod_base = OTHER; note = Nucleotide with phosphorothioate linkage
  modified_base 8: mod_base = OTHER; note = Nucleotide with phosphorothioate linkage
  modified_base 9: mod_base = OTHER; note = Nucleotide with phosphorothioate linkage
  modified_base 10: mod_base = OTHER; note = 8-amino-guanosine with phosphorothioate linkage
  modified_base 11: mod_base = OTHER; note = Nucleotide with phosphorothioate linkage
  modified_base 12: mod_base = OTHER; note = Thymine with phosphorothioate linkage
  modified_base 13: mod_base = OTHER; note = Nucleotide with phosphorothioate linkage
  modified_base 14: mod_base = OTHER; note = Nucleotide with phosphorothioate linkage
  modified_base 15: mod_base = OTHER; note = Nucleotide with phosphorothioate linkage
  modified_base 16: mod_base = OTHER; note = 2'-O-methoxyethyl modified nucleotide with phosphorothioate linkage
  modified_base 17: mod_base = OTHER; note = 2'-O-methoxyethyl 5-methylcytosine with phosphorothioate linkage
  modified_base 18: mod_base = OTHER; note = 2'-O-methoxyethyl modified nucleotide with phosphorothioate linkage
  modified_base 19: mod_base = OTHER; note = 2'-O-methoxyethyl modified nucleotide with phosphorothioate linkage
  modified_base 20: mod_base = OTHER; note = 2'-O-methoxyethyl modified nucleotide
  misc_feature 1..5: note = RNA
  misc_feature 6..15: note = DNA
  misc_feature 16..20: note = RNA
acgtgcagaggtgaagcgaa

SEQ ID NO: 134 - DNA, 20 bp, synthetic construct
  source 1..20: mol_type = other DNA
  modified_base 1: mod_base = OTHER; note = 2'-O-methoxyethyl modified nucleotide with phosphorothioate linkage
  modified_base 2: mod_base = OTHER; note = 2'-O-methoxyethyl 5-methylcytosine with phosphorothioate linkage
  modified_base 3: mod_base = OTHER; note = 2'-O-methoxyethyl modified nucleotide with phosphorothioate linkage
  modified_base 4: mod_base = OTHER; note = 2'-O-methoxyethyl modified thymine with phosphorothioate linkage
  modified_base 5: mod_base = OTHER; note = 2'-O-methoxyethyl modified nucleotide with phosphorothioate linkage
  modified_base 6: mod_base = OTHER; note = 5-methylcytosine with phosphorothioate linkage
  modified_base 7: mod_base = OTHER; note = Nucleotide with phosphorothioate linkage
  modified_base 8: mod_base = OTHER; note = Nucleotide with phosphorothioate linkage
  modified_base 9: mod_base = OTHER; note = Nucleotide with phosphorothioate linkage
  modified_base 10: mod_base = OTHER; note = Nucleotide with phosphorothioate linkage
  modified_base 11: mod_base = OTHER; note = 8-amino-guanosine with phosphorothioate linkage
  modified_base 12: mod_base = OTHER; note = Thymine with phosphorothioate linkage
  modified_base 13: mod_base = OTHER; note = Nucleotide with phosphorothioate linkage
  modified_base 14: mod_base = OTHER; note = Nucleotide with phosphorothioate linkage
  modified_base 15: mod_base = OTHER; note = Nucleotide with phosphorothioate linkage
  modified_base 16: mod_base = OTHER; note = 2'-O-methoxyethyl modified nucleotide with phosphorothioate linkage
  modified_base 17: mod_base = OTHER; note = 2'-O-methoxyethyl 5-methylcytosine with phosphorothioate linkage
  modified_base 18: mod_base = OTHER; note = 2'-O-methoxyethyl modified nucleotide with phosphorothioate linkage
  modified_base 19: mod_base = OTHER; note = 2'-O-methoxyethyl modified nucleotide with phosphorothioate linkage
  modified_base 20: mod_base = OTHER; note = 2'-O-methoxyethyl modified nucleotide
  misc_feature 1..5: note = RNA
  misc_feature 6..15: note = DNA
  misc_feature 16..20: note = RNA
acgtgcagaggtgaagcgaa

SEQ ID NO: 135 - DNA, 20 bp, synthetic construct
  source 1..20: mol_type = other DNA
  modified_base 1: mod_base = OTHER; note = 2'-O-methoxyethyl modified nucleotide with phosphorothioate linkage
  modified_base 2: mod_base = OTHER; note = 2'-O-methoxyethyl 5-methylcytosine with phosphorothioate linkage
  modified_base 3: mod_base = OTHER; note = 2'-O-methoxyethyl modified nucleotide with phosphorothioate linkage
  modified_base 4: mod_base = OTHER; note = 2'-O-methoxyethyl modified thymine with phosphorothioate linkage
  modified_base 5: mod_base = OTHER; note = 2'-O-methoxyethyl modified nucleotide with phosphorothioate linkage
  modified_base 6: mod_base = OTHER; note = 5-methylcytosine with phosphorothioate linkage
  modified_base 7: mod_base = OTHER; note = Nucleotide with phosphorothioate linkage
  modified_base 8: mod_base = OTHER; note = Nucleotide with phosphorothioate linkage
  modified_base 9: mod_base = OTHER; note = Nucleotide with phosphorothioate linkage
  modified_base 10: mod_base = OTHER; note = Nucleotide with phosphorothioate linkage
  modified_base 11: mod_base = OTHER; note = Nucleotide with phosphorothioate linkage
  modified_base 12: mod_base = OTHER; note = 2-thio-thymine with phosphorothioate linkage
  modified_base 13: mod_base = OTHER; note = Nucleotide with phosphorothioate linkage
  modified_base 14: mod_base = OTHER; note = Nucleotide with phosphorothioate linkage
  modified_base 15: mod_base = OTHER; note = Nucleotide with phosphorothioate linkage
  modified_base 16: mod_base = OTHER; note = 2'-O-methoxyethyl modified nucleotide with phosphorothioate linkage
  modified_base 17: mod_base = OTHER; note = 2'-O-methoxyethyl 5-methylcytosine with phosphorothioate linkage
  modified_base 18: mod_base = OTHER; note = 2'-O-methoxyethyl modified nucleotide with phosphorothioate linkage
  modified_base 19: mod_base = OTHER; note = 2'-O-methoxyethyl modified nucleotide with phosphorothioate linkage
  modified_base 20: mod_base = OTHER; note = 2'-O-methoxyethyl modified nucleotide
  misc_feature 1..5: note = RNA
  misc_feature 6..15: note = DNA
  misc_feature 16..20: note = RNA
acgtgcagaggtgaagcgaa

SEQ ID NO: 136 - DNA, 20 bp, synthetic construct
  source 1..20: mol_type = other DNA
  modified_base 1: mod_base = OTHER; note = 2'-O-methoxyethyl modified nucleotide with phosphorothioate linkage
  modified_base 2: mod_base = OTHER; note = 2'-O-methoxyethyl 5-methylcytosine with phosphorothioate linkage
  modified_base 3: mod_base = OTHER; note = 2'-O-methoxyethyl modified nucleotide with phosphorothioate linkage
  modified_base 4: mod_base = OTHER; note = 2'-O-methoxyethyl modified thymine with phosphorothioate linkage
  modified_base 5: mod_base = OTHER; note = 2'-O-methoxyethyl modified nucleotide with phosphorothioate linkage
  modified_base 6: mod_base = OTHER; note = 5-methylcytosine with phosphorothioate linkage
  modified_base 7: mod_base = OTHER; note = Nucleotide with phosphorothioate linkage
  modified_base 8: mod_base = OTHER; note = Nucleotide with phosphorothioate linkage
  modified_base 9: mod_base = OTHER; note = Nucleotide with phosphorothioate linkage
  modified_base 10: mod_base = OTHER; note = Nucleotide with phosphorothioate linkage
  modified_base 11: mod_base = OTHER; note = Nucleotide with phosphorothioate linkage
  modified_base 12: mod_base = OTHER; note = Thymine with phosphorothioate linkage
  modified_base 13: mod_base = OTHER; note = 8-amino-guanosine with phosphorothioate linkage
  modified_base 14: mod_base = OTHER; note = Nucleotide with phosphorothioate linkage
  modified_base 15: mod_base = OTHER; note = Nucleotide with phosphorothioate linkage
  modified_base 16: mod_base = OTHER; note = 2'-O-methoxyethyl modified nucleotide with phosphorothioate linkage
  modified_base 17: mod_base = OTHER; note = 2'-O-methoxyethyl 5-methylcytosine with phosphorothioate linkage
  modified_base 18: mod_base = OTHER; note = 2'-O-methoxyethyl modified nucleotide with phosphorothioate linkage
  modified_base 19: mod_base = OTHER; note = 2'-O-methoxyethyl modified nucleotide with phosphorothioate linkage
  modified_base 20: mod_base = OTHER; note = 2'-O-methoxyethyl modified nucleotide
  misc_feature 1..5: note = RNA
  misc_feature 6..15: note = DNA
  misc_feature 16..20: note = RNA
acgtgcagaggtgaagcgaa

SEQ ID NO: 137 - DNA, 20 bp, synthetic construct
  source 1..20: mol_type = other DNA
  modified_base 1: mod_base = OTHER; note = 2'-O-methoxyethyl modified nucleotide with phosphorothioate linkage
  modified_base 2: mod_base = OTHER; note = 2'-O-methoxyethyl 5-methylcytosine with phosphorothioate linkage
  modified_base 3: mod_base = OTHER; note = 2'-O-methoxyethyl modified nucleotide with phosphorothioate linkage
  modified_base 4: mod_base = OTHER; note = 2'-O-methoxyethyl modified thymine with phosphorothioate linkage
  modified_base 5: mod_base = OTHER; note = 2'-O-methoxyethyl modified nucleotide with phosphorothioate linkage
  modified_base 6: mod_base = OTHER; note = 5-methylcytosine with phosphorothioate linkage
  modified_base 7: mod_base = OTHER; note = Nucleotide with phosphorothioate linkage
  modified_base 8: mod_base = OTHER; note = Nucleotide with phosphorothioate linkage
  modified_base 9: mod_base = OTHER; note = Nucleotide with phosphorothioate linkage
  modified_base 10: mod_base = OTHER; note = Nucleotide with phosphorothioate linkage
  modified_base 11: mod_base = OTHER; note = Nucleotide with phosphorothioate linkage
  modified_base 12: mod_base = OTHER; note = Thymine with phosphorothioate linkage
  modified_base 13: mod_base = OTHER; note = Nucleotide with phosphorothioate linkage
  modified_base 14: mod_base = OTHER; note = 8-amino-adenosine with phosphorothioate linkage
  modified_base 15: mod_base = OTHER; note = Nucleotide with phosphorothioate linkage
  modified_base 16: mod_base = OTHER; note = 2'-O-methoxyethyl modified nucleotide with phosphorothioate linkage
  modified_base 17: mod_base = OTHER; note = 2'-O-methoxyethyl 5-methylcytosine with phosphorothioate linkage
  modified_base 18: mod_base = OTHER; note = 2'-O-methoxyethyl modified nucleotide with phosphorothioate linkage
  modified_base 19: mod_base = OTHER; note = 2'-O-methoxyethyl modified nucleotide with phosphorothioate linkage
  modified_base 20: mod_base = OTHER; note = 2'-O-methoxyethyl modified nucleotide
  misc_feature 1..5: note = RNA
  misc_feature 6..15: note = DNA
  misc_feature 16..20: note = RNA
acgtgcagaggtgaagcgaa

SEQ ID NO: 138 - DNA, 20 bp, synthetic construct
  source 1..20: mol_type = other DNA
  modified_base 1: mod_base = OTHER; note = 2'-O-methoxyethyl modified nucleotide with phosphorothioate linkage
  modified_base 2: mod_base = OTHER; note = 2'-O-methoxyethyl 5-methylcytosine with phosphorothioate linkage
  modified_base 3: mod_base = OTHER; note = 2'-O-methoxyethyl modified nucleotide with phosphorothioate linkage
  modified_base 4: mod_base = OTHER; note = 2'-O-methoxyethyl modified thymine with phosphorothioate linkage
  modified_base 5: mod_base = OTHER; note = 2'-O-methoxyethyl modified nucleotide with phosphorothioate linkage
  modified_base 6: mod_base = OTHER; note = 5-methylcytosine with phosphorothioate linkage
  modified_base 7: mod_base = OTHER; note = Nucleotide with phosphorothioate linkage
  modified_base 8: mod_base = OTHER; note = Nucleotide with phosphorothioate linkage
  modified_base 9: mod_base = OTHER; note = Nucleotide with phosphorothioate linkage
  modified_base 10: mod_base = OTHER; note = Nucleotide with phosphorothioate linkage
  modified_base 11: mod_base = OTHER; note = Nucleotide with phosphorothioate linkage
  modified_base 12: mod_base = OTHER; note = Thymine with phosphorothioate linkage
  modified_base 13: mod_base = OTHER; note = Nucleotide with phosphorothioate linkage
  modified_base 14: mod_base = OTHER; note = Nucleotide with phosphorothioate linkage
  modified_base 15: mod_base = OTHER; note = 8-amino-adenosine with phosphorothioate linkage
  modified_base 16: mod_base = OTHER; note = 2'-O-methoxyethyl modified nucleotide with phosphorothioate linkage
  modified_base 17: mod_base = OTHER; note = 2'-O-methoxyethyl 5-methylcytosine with phosphorothioate linkage
  modified_base 18: mod_base = OTHER; note = 2'-O-methoxyethyl modified nucleotide with phosphorothioate linkage
  modified_base 19: mod_base = OTHER; note = 2'-O-methoxyethyl modified nucleotide with phosphorothioate linkage
  modified_base 20: mod_base = OTHER; note = 2'-O-methoxyethyl modified nucleotide
  misc_feature 1..5: note = RNA
  misc_feature 6..15: note = DNA
  misc_feature 16..20: note = RNA
acgtgcagaggtgaagcgaa

SEQ ID NO: 139 - DNA, 20 bp, synthetic construct
  source 1..20: mol_type = other DNA
  modified_base 1: mod_base = OTHER; note = 2'-O-methoxyethyl modified nucleotide with phosphorothioate linkage
  modified_base 2: mod_base = OTHER; note = 2'-O-methoxyethyl 5-methylcytosine with phosphorothioate linkage
  modified_base 3: mod_base = OTHER; note = 2'-O-methoxyethyl modified nucleotide with phosphorothioate linkage
  modified_base 4: mod_base = OTHER; note = 2'-O-methoxyethyl modified nucleotide with phosphorothioate linkage
  modified_base 5: mod_base = OTHER; note = 2'-O-methoxyethyl modified nucleotide with phosphorothioate linkage
  modified_base 6: mod_base = OTHER; note = Nucleotide with phosphorothioate linkage
  modified_base 7: mod_base = OTHER; note = Nucleotide with phosphorothioate linkage
  modified_base 8: mod_base = OTHER; note = Thymine with phosphorothioate linkage
  modified_base 9: mod_base = OTHER; note = Nucleotide with phosphorothioate linkage
  modified_base 10: mod_base = OTHER; note = Nucleotide with phosphorothioate linkage
  modified_base 11: mod_base = OTHER; note = Nucleotide with phosphorothioate linkage
  modified_base 12: mod_base = OTHER; note = Nucleotide with phosphorothioate linkage
  modified_base 13: mod_base = OTHER; note = 5-methylcytosine with phosphorothioate linkage
  modified_base 14: mod_base = OTHER; note = Nucleotide with phosphorothioate linkage
  modified_base 15: mod_base = OTHER; note = Nucleotide with phosphorothioate linkage
  modified_base 16: mod_base = OTHER; note = 2'-O-methoxyethyl modified nucleotide with phosphorothioate linkage
  modified_base 17: mod_base = OTHER; note = 2'-O-methoxyethyl modified nucleotide with phosphorothioate linkage
  modified_base 18: mod_base = OTHER; note = Nucleotide with phosphorothioate linkage
  modified_base 19: mod_base = OTHER; note = Nucleotide with phosphorothioate linkage
  modified_base 20: mod_base = OTHER; note = 2'-O-methoxyethyl 5-methylcytosine
  misc_feature 1..5: note = RNA
  misc_feature 6..15: note = DNA
  misc_feature 16..20: note = RNA
gcagaggtgaagcgaagtgc

SEQ ID NO: 140 - DNA, 20 bp, synthetic construct
  source 1..20: mol_type = other DNA
  modified_base 1: mod_base = OTHER; note = 2'-O-methoxyethyl modified nucleotide with phosphorothioate linkage
  modified_base 2: mod_base = OTHER; note = 2'-O-methoxyethyl 5-methylcytosine with phosphorothioate linkage
  modified_base 3: mod_base = OTHER; note = 2'-O-methoxyethyl modified nucleotide with phosphorothioate linkage
  modified_base 4: mod_base = OTHER; note = 2'-O-methoxyethyl modified nucleotide with phosphorothioate linkage
  modified_base 5: mod_base = OTHER; note = Nucleotide with phosphorothioate linkage
  modified_base 6: mod_base = OTHER; note = Nucleotide with phosphorothioate linkage
  modified_base 7: mod_base = OTHER; note = Nucleotide with phosphorothioate linkage
  modified_base 8: mod_base = OTHER; note = Thymine with phosphorothioate linkage
  modified_base 9: mod_base = OTHER; note = Nucleotide with phosphorothioate linkage
  modified_base 10: mod_base = OTHER; note = 2'-O-methoxyethyl modified nucleotide with phosphorothioate linkage
  modified_base 11: mod_base = OTHER; note = Nucleotide with phosphorothioate linkage
  modified_base 12: mod_base = OTHER; note = Nucleotide with phosphorothioate linkage
  modified_base 13: mod_base = OTHER; note = 5-methylcytosine with phosphorothioate linkage
  modified_base 14: mod_base = OTHER; note = Nucleotide with phosphorothioate linkage
  modified_base 15: mod_base = OTHER; note = Nucleotide with phosphorothioate linkage
  modified_base 16: mod_base = OTHER; note = 2'-O-methoxyethyl modified nucleotide with phosphorothioate linkage
  modified_base 17: mod_base = OTHER; note = Locked nucleic acid with phosphorothioate linkage
  modified_base 18: mod_base = OTHER; note = 2'-O-methoxyethyl modified thymine with phosphorothioate linkage
  modified_base 19: mod_base = OTHER; note = Locked nucleic acid with phosphorothioate linkage
  modified_base 20: mod_base = OTHER; note = Locked 5-methylcytosine
  misc_feature 1..4: note = RNA
  misc_feature 5..9: note = DNA
  misc_feature 10: note = RNA
  misc_feature 11..15: note = DNA
  misc_feature 16..20: note = RNA
gcagaggtgaagcgaagtgc

SEQ ID NO: 141 - DNA, 20 bp, synthetic construct
  source 1..20: mol_type = other DNA
  modified_base 1: mod_base = OTHER; note = 2'-O-methoxyethyl 5-methylcytosine with phosphorothioate linkage
  modified_base 2: mod_base = OTHER; note = 2'-O-methoxyethyl modified nucleotide with phosphorothioate linkage
  modified_base 3: mod_base = OTHER; note = 2'-O-methoxyethyl modified nucleotide with phosphorothioate linkage
  modified_base 4: mod_base = OTHER; note = 2'-O-methyl modified nucleotide with phosphorothioate linkage
  modified_base 5: mod_base = OTHER; note = 2'-O-methoxyethyl modified nucleotide with phosphorothioate linkage
  modified_base 6: mod_base = OTHER; note = Nucleotide with phosphorothioate linkage
  modified_base 7: mod_base = OTHER; note = Thymine with phosphorothioate linkage
  modified_base 8: mod_base = OTHER; note = Nucleotide with phosphorothioate linkage
  modified_base 9: mod_base = OTHER; note = Nucleotide with phosphorothioate linkage
  modified_base 10: mod_base = OTHER; note = Nucleotide with phosphorothioate linkage
  modified_base 11: mod_base = OTHER; note = Nucleotide with phosphorothioate linkage
  modified_base 12: mod_base = OTHER; note = 5-methylcytosine with phosphorothioate linkage
  modified_base 13: mod_base = OTHER; note = Nucleotide with phosphorothioate linkage
  modified_base 14: mod_base = OTHER; note = Nucleotide with phosphorothioate linkage
  modified_base 15: mod_base = OTHER; note = Nucleotide with phosphorothioate linkage
  modified_base 16: mod_base = OTHER; note = 2'-O-methoxyethyl modified nucleotide with phosphorothioate linkage
  modified_base 17: mod_base = OTHER; note = 2'-O-methoxyethyl modified thymine with phosphorothioate linkage
  modified_base 18: mod_base = OTHER; note = 2'-O-methoxyethyl modified nucleotide with phosphorothioate linkage
  modified_base 19: mod_base = OTHER; note = 2'-O-methoxyethyl 5-methylcytosine with phosphorothioate linkage
  modified_base 20: mod_base = OTHER; note = 2'-O-methoxyethyl modified nucleotide
  misc_feature 1..5: note = RNA
  misc_feature 6..15: note = DNA
  misc_feature 16..20: note = RNA
cagaggtgaagcgaagtgca

SEQ ID NO: 142 - DNA, 20 bp, synthetic construct
  source 1..20: mol_type = other DNA
  modified_base 1: mod_base = OTHER; note = 2'-O-methoxyethyl 5-methylcytosine with phosphorothioate linkage
  modified_base 2: mod_base = OTHER; note = 2'-O-methoxyethyl modified nucleotide with phosphorothioate linkage
  modified_base 3: mod_base = OTHER; note = 2'-O-methoxyethyl modified nucleotide with phosphorothioate linkage
  modified_base 4: mod_base = OTHER; note = 2'-O-methoxyethyl modified nucleotide with phosphorothioate linkage
  modified_base 5: mod_base = OTHER; note = 2'-O-methoxyethyl modified nucleotide with phosphorothioate linkage
  modified_base 6: mod_base = OTHER; note = 2'-O-methyl modified nucleotide with phosphorothioate linkage
  modified_base 7: mod_base = OTHER; note = Thymine with phosphorothioate linkage
  modified_base 8: mod_base = OTHER; note = Nucleotide with phosphorothioate linkage
  modified_base 9: mod_base = OTHER; note = Nucleotide with phosphorothioate linkage
  modified_base 10: mod_base = OTHER; note = Nucleotide with phosphorothioate linkage
  modified_base 11: mod_base = OTHER; note = Nucleotide with phosphorothioate linkage
  modified_base 12: mod_base = OTHER; note = 5-methylcytosine with phosphorothioate linkage
  modified_base 13: mod_base = OTHER; note = Nucleotide with phosphorothioate linkage
  modified_base 14: mod_base = OTHER; note = Nucleotide with phosphorothioate linkage
  modified_base 15: mod_base = OTHER; note = Nucleotide with phosphorothioate linkage
  modified_base 16: mod_base = OTHER; note = 2'-O-methoxyethyl modified nucleotide with phosphorothioate linkage
  modified_base 17: mod_base = OTHER; note = 2'-O-methoxyethyl modified thymine with phosphorothioate linkage
  modified_base 18: mod_base = OTHER; note = 2'-O-methoxyethyl modified nucleotide with phosphorothioate linkage
  modified_base 19: mod_base = OTHER; note = 2'-O-methoxyethyl 5-methylcytosine with phosphorothioate linkage
  modified_base 20: mod_base = OTHER; note = 2'-O-methoxyethyl modified nucleotide
  misc_feature 1..6: note = RNA
  misc_feature 7..15: note = DNA
  misc_feature 16..20: note = RNA
cagaggtgaagcgaagtgca

SEQ ID NO: 143 - DNA, 20 bp, synthetic construct
  source 1..20: mol_type = other DNA
  modified_base 1: mod_base = OTHER; note = 2'-O-methoxyethyl 5-methylcytosine with phosphorothioate linkage
  modified_base 2: mod_base = OTHER; note = 2'-O-methoxyethyl modified nucleotide with phosphorothioate linkage
  modified_base 3: mod_base = OTHER; note = 2'-O-methoxyethyl modified nucleotide with phosphorothioate linkage
  modified_base 4: mod_base = OTHER; note = 2'-O-methyl modified nucleotide with phosphorothioate linkage
  modified_base 5: mod_base = OTHER; note = 2'-O-methyl modified nucleotide with phosphorothioate linkage
  modified_base 6: mod_base = OTHER; note = Nucleotide with phosphorothioate linkage
  modified_base 7: mod_base = OTHER; note = Thymine with phosphorothioate linkage
  modified_base 8: mod_base = OTHER; note = Nucleotide with phosphorothioate linkage
  modified_base 9: mod_base = OTHER; note = Nucleotide with phosphorothioate linkage
  modified_base 10: mod_base = OTHER; note = Nucleotide with phosphorothioate linkage
  modified_base 11: mod_base = OTHER; note = Nucleotide with phosphorothioate linkage
  modified_base 12: mod_base = OTHER; note = 5-methylcytosine with phosphorothioate linkage
  modified_base 13: mod_base = OTHER; note = Nucleotide with phosphorothioate linkage
  modified_base 14: mod_base = OTHER; note = Nucleotide with phosphorothioate linkage
  modified_base 15: mod_base = OTHER; note = Nucleotide with phosphorothioate linkage
  modified_base 16: mod_base = OTHER; note = 2'-O-methoxyethyl modified nucleotide with phosphorothioate linkage
  modified_base 17: mod_base = OTHER; note = 2'-O-methoxyethyl modified thymine with phosphorothioate linkage
  modified_base 18: mod_base = OTHER; note = 2'-O-methoxyethyl modified nucleotide with phosphorothioate linkage
  modified_base 19: mod_base = OTHER; note = 2'-O-methoxyethyl 5-methylcytosine with phosphorothioate linkage
  modified_base 20: mod_base = OTHER; note = 2'-O-methoxyethyl modified nucleotide
  misc_feature 1..5: note = RNA
  misc_feature 6..15: note = DNA
  misc_feature 16..20: note = RNA
cagaggtgaagcgaagtgca

SEQ ID NO: 144 - DNA, 20 bp, synthetic construct
  source 1..20: mol_type = other DNA
  modified_base 1: mod_base = OTHER; note = 2'-O-methoxyethyl 5-methylcytosine with phosphorothioate linkage
  modified_base 2: mod_base = OTHER; note = 2'-O-methoxyethyl modified nucleotide with phosphorothioate linkage
  modified_base 3: mod_base = OTHER; note = 2'-O-methoxyethyl modified nucleotide with phosphorothioate linkage
  modified_base 4: mod_base = OTHER; note = 2'-O-methoxyethyl modified nucleotide with phosphorothioate linkage
  modified_base 5: mod_base = OTHER; note = 2'-O-methoxyethyl modified nucleotide with phosphorothioate linkage
  modified_base 6: mod_base = OTHER; note = Nucleotide with phosphorothioate linkage
  modified_base 7: mod_base = OTHER; note = Thymine with phosphorothioate linkage
  modified_base 8: mod_base = OTHER; note = Nucleotide with phosphorothioate linkage
  modified_base 9: mod_base = OTHER; note = Nucleotide with phosphorothioate linkage
  modified_base 10: mod_base = OTHER; note = Nucleotide with phosphorothioate linkage
  modified_base 11: mod_base = OTHER; note = Nucleotide with phosphorothioate linkage
  modified_base 12: mod_base = OTHER; note = 5-methylcytosine with phosphorothioate linkage
  modified_base 13: mod_base = OTHER; note = Nucleotide with phosphorothioate linkage
  modified_base 14: mod_base = OTHER; note = Nucleotide with phosphorothioate linkage
  modified_base 15: mod_base = OTHER; note = Nucleotide with phosphorothioate linkage
  modified_base 16: mod_base = OTHER; note = 2'-O-methoxyethyl modified nucleotide with phosphorothioate linkage
  modified_base 17: mod_base = OTHER; note = 2'-O-methoxyethyl modified thymine with phosphorothioate linkage
  modified_base 18: mod_base = OTHER; note = 2'-O-methoxyethyl modified nucleotide with phosphorothioate linkage
  modified_base 19: mod_base = OTHER; note = 2'-O-methoxyethyl 5-methylcytosine with phosphorothioate linkage
  modified_base 20: mod_base = OTHER; note = 2'-O-methoxyethyl modified nucleotide
  misc_feature 1..5: note = RNA
  misc_feature 6..15: note = DNA
  misc_feature 16..20: note = RNA
cagaggtgaagcgaagtgca

SEQ ID NO: 145 - DNA, 20 bp, synthetic construct
  source 1..20: mol_type = other DNA
  modified_base 1: mod_base = OTHER; note = 2'-O-methoxyethyl 5-methylcytosine with phosphorothioate linkage
  modified_base 2: mod_base = OTHER; note = 2'-O-methoxyethyl modified nucleotide with phosphorothioate linkage
  modified_base 3: mod_base = OTHER; note = 2'-O-methyl modified nucleotide with phosphorothioate linkage
  modified_base 4: mod_base = OTHER; note = 2'-O-methoxyethyl modified nucleotide with phosphorothioate linkage
  modified_base 5: mod_base = OTHER; note = 2'-O-methyl modified nucleotide with phosphorothioate linkage
  modified_base 6: mod_base = OTHER; note = Nucleotide with phosphorothioate linkage
  modified_base 7: mod_base = OTHER; note = Thymine with phosphorothioate linkage
  modified_base 8: mod_base = OTHER; note = Nucleotide with phosphorothioate linkage
  modified_base 9: mod_base = OTHER; note = Nucleotide with phosphorothioate linkage
  modified_base 10: mod_base = OTHER; note = Nucleotide with phosphorothioate linkage
  modified_base 11: mod_base = OTHER; note = Nucleotide with phosphorothioate linkage
  modified_base 12: mod_base = OTHER; note = 5-methylcytosine with phosphorothioate linkage
  modified_base 13: mod_base = OTHER; note = Nucleotide with phosphorothioate linkage
  modified_base 14: mod_base = OTHER; note = Nucleotide with phosphorothioate linkage
  modified_base 15: mod_base = OTHER; note = Nucleotide with phosphorothioate linkage
  modified_base 16: mod_base = OTHER; note = 2'-O-methoxyethyl modified nucleotide with phosphorothioate linkage
  modified_base 17: mod_base = OTHER; note = 2'-O-methoxyethyl modified thymine with phosphorothioate linkage
  modified_base 18: mod_base = OTHER; note = 2'-O-methoxyethyl modified nucleotide with phosphorothioate linkage
  modified_base 19: mod_base = OTHER; note = 2'-O-methoxyethyl 5-methylcytosine with phosphorothioate linkage
  modified_base 20: mod_base = OTHER; note = 2'-O-methoxyethyl modified nucleotide
  misc_feature 1..5: note = RNA
  misc_feature 6..15: note = DNA
  misc_feature 16..20: note = RNA
cagaggtgaagcgaagtgca

SEQ ID NO: 146 - DNA, 20 bp, synthetic construct
  source 1..20: mol_type = other DNA
  modified_base 1: mod_base = OTHER; note = 2'-O-methoxyethyl 5-methylcytosine with phosphorothioate linkage
  modified_base 2: mod_base = OTHER; note = 2'-O-methoxyethyl modified nucleotide with phosphorothioate linkage
  modified_base 3: mod_base = OTHER; note = 2'-O-methoxyethyl modified nucleotide with phosphorothioate linkage
  modified_base 4: mod_base = OTHER; note = 2'-O-methoxyethyl modified nucleotide with phosphorothioate linkage
  modified_base 5: mod_base = OTHER; note = 2'-O-methoxyethyl modified nucleotide with phosphorothioate linkage
  modified_base 6: mod_base = OTHER; note = Nucleotide with phosphorothioate linkage
  modified_base 7: mod_base = OTHER; note = Thymine with phosphorothioate linkage
  modified_base 8: mod_base = OTHER; note = Nucleotide with phosphorothioate linkage
  modified_base 9: mod_base = OTHER; note = Nucleotide with phosphorothioate linkage
  modified_base 10: mod_base = OTHER; note = Nucleotide with phosphorothioate linkage
  modified_base 11: mod_base = OTHER; note = Nucleotide with phosphorothioate linkage
  modified_base 12: mod_base = OTHER; note = 5-methylcytosine with phosphorothioate linkage
  modified_base 13: mod_base = OTHER; note = Nucleotide with phosphorothioate linkage
  modified_base 14: mod_base = OTHER; note = Nucleotide with phosphorothioate linkage
  modified_base 15: mod_base = OTHER; note = Nucleotide with phosphorothioate linkage
  modified_base 16: mod_base = OTHER; note = 2'-O-methyl modified nucleotide with phosphorothioate linkage
  modified_base 17: mod_base = OTHER; note = 2'-O-methoxyethyl modified thymine with phosphorothioate linkage
  modified_base 18: mod_base = OTHER; note = 2'-O-methyl modified nucleotide with phosphorothioate linkage
  modified_base 19: mod_base = OTHER; note = 2'-O-methoxyethyl 5-methylcytosine with phosphorothioate linkage
  modified_base 20: mod_base = OTHER; note = 2'-O-methoxyethyl modified nucleotide
  misc_feature 1..5: note = RNA
  misc_feature 6..15: note = DNA
  misc_feature 16..20: note = RNA
cagaggtgaagcgaagtgca

SEQ ID NO: 147 - DNA, 20 bp, synthetic construct
  source 1..20: mol_type = other DNA
  modified_base 1: mod_base = OTHER; note = 2'-O-methoxyethyl 5-methylcytosine with phosphorothioate linkage
  modified_base 2: mod_base = OTHER; note = 2'-O-methoxyethyl modified nucleotide with phosphorothioate linkage
  modified_base 3: mod_base = OTHER; note = 2'-O-methyl modified nucleotide with phosphorothioate linkage
  modified_base 4: mod_base = OTHER; note = 2'-O-methoxyethyl modified nucleotide with phosphorothioate linkage
  modified_base 5: mod_base = OTHER; note = 2'-O-methyl modified nucleotide with phosphorothioate linkage
  modified_base 6: mod_base = OTHER; note = Nucleotide with phosphorothioate linkage
  modified_base 7: mod_base = OTHER; note = Thymine with phosphorothioate linkage
  modified_base 8: mod_base = OTHER; note = Nucleotide with phosphorothioate linkage
  modified_base 9: mod_base = OTHER; note = Nucleotide with phosphorothioate linkage
  modified_base 10: mod_base = OTHER; note = Nucleotide with phosphorothioate linkage
  modified_base 11: mod_base = OTHER; note = Nucleotide with phosphorothioate linkage
  modified_base 12: mod_base = OTHER; note = 5-methylcytosine with phosphorothioate linkage
  modified_base 13: mod_base = OTHER; note = Nucleotide with phosphorothioate linkage
  modified_base 14: mod_base = OTHER; note = Nucleotide with phosphorothioate linkage
  modified_base 15: mod_base = OTHER; note = Nucleotide with phosphorothioate linkage
  modified_base 16: mod_base = OTHER; note = 2'-O-methyl modified nucleotide with phosphorothioate linkage
  modified_base 17: mod_base = OTHER; note = 2'-O-methoxyethyl modified thymine with phosphorothioate linkage
  modified_base 18: mod_base = OTHER; note = 2'-O-methoxyethyl modified nucleotide with phosphorothioate linkage
  modified_base 19: mod_base = OTHER; note = 2'-O-methoxyethyl 5-methylcytosine with phosphorothioate linkage
  modified_base 20: mod_base = OTHER; note = 2'-O-methoxyethyl modified nucleotide
  misc_feature 1..5: note = RNA
  misc_feature 6..15: note = DNA
  misc_feature 16..20: note = RNA
cagaggtgaagcgaagtgca

SEQ ID NO: 148 - DNA, 20 bp, synthetic construct
  source 1..20: mol_type = other DNA
  modified_base 1: mod_base = OTHER; note = 2'-O-methoxyethyl 5-methylcytosine with phosphorothioate linkage
  modified_base 2: mod_base = OTHER; note = 2'-O-methoxyethyl modified nucleotide with phosphorothioate linkage
  modified_base 3: mod_base = OTHER; note = 2'-O-methyl modified nucleotide with phosphorothioate linkage
  modified_base 4: mod_base = OTHER; note = 2'-O-methoxyethyl modified nucleotide with phosphorothioate linkage
  modified_base 5: mod_base = OTHER; note = 2'-O-methyl modified nucleotide with phosphorothioate linkage
  modified_base 6: mod_base = OTHER; note = Nucleotide with phosphorothioate linkage
  modified_base 7: mod_base = OTHER; note = Thymine with phosphorothioate linkage
  modified_base 8: mod_base = OTHER; note = Nucleotide with phosphorothioate linkage
  modified_base 9: mod_base = OTHER; note = Nucleotide with phosphorothioate linkage
  modified_base 10: mod_base = OTHER; note = Nucleotide with phosphorothioate linkage
  modified_base 11: mod_base = OTHER; note = Nucleotide with phosphorothioate linkage
  modified_base 12: mod_base = OTHER; note = 5-methylcytosine with phosphorothioate linkage
  modified_base 13: mod_base = OTHER; note = Nucleotide with phosphorothioate linkage
  modified_base 14: mod_base = OTHER; note = Nucleotide with phosphorothioate linkage
  modified_base 15: mod_base = OTHER; note = Nucleotide with phosphorothioate linkage
  modified_base 16: mod_base = OTHER; note = 2'-O-methoxyethyl modified nucleotide with phosphorothioate linkage
  modified_base 17: mod_base = OTHER; note = 2'-O-methoxyethyl modified thymine with phosphorothioate linkage
  modified_base 18: mod_base = OTHER; note = 2'-O-methyl modified nucleotide with phosphorothioate linkage
  modified_base 19: mod_base = OTHER; note = 2'-O-methoxyethyl 5-methylcytosine with phosphorothioate linkage
  modified_base 20: mod_base = OTHER; note = 2'-O-methoxyethyl modified nucleotide
  misc_feature 1..5: note = RNA
  misc_feature 6..15: note = DNA
  misc_feature 16..20: note = RNA
cagaggtgaagcgaagtgca

SEQ ID NO: 149 - DNA, 20 bp, synthetic construct
  source 1..20: mol_type = other DNA
  modified_base 1: mod_base = OTHER; note = 2'-O-methoxyethyl 5-methylcytosine with phosphorothioate linkage
  modified_base 2: mod_base = OTHER; note = 2'-O-methoxyethyl modified nucleotide with phosphorothioate linkage
  modified_base 3: mod_base = OTHER; note = 2'-O-methyl modified nucleotide with phosphorothioate linkage
  modified_base 4: mod_base = OTHER; note = 2'-O-methoxyethyl modified nucleotide with phosphorothioate linkage
  modified_base 5: mod_base = OTHER; note = 2'-O-methoxyethyl modified nucleotide with phosphorothioate linkage
  modified_base 6: mod_base = OTHER; note = Nucleotide with phosphorothioate linkage
  modified_base 7: mod_base = OTHER; note = Thymine with phosphorothioate linkage
  modified_base 8: mod_base = OTHER; note = Nucleotide with phosphorothioate linkage
  modified_base 9: mod_base = OTHER; note = Nucleotide with phosphorothioate linkage
  modified_base 10: mod_base = OTHER; note = Nucleotide with phosphorothioate linkage
  modified_base 11: mod_base = OTHER; note = Nucleotide with phosphorothioate linkage
  modified_base 12: mod_base = OTHER; note = 5-methylcytosine with phosphorothioate linkage
  modified_base 13: mod_base = OTHER; note = Nucleotide with phosphorothioate linkage
  modified_base 14: mod_base = OTHER; note = Nucleotide with phosphorothioate linkage
  modified_base 15: mod_base = OTHER; note = Nucleotide with phosphorothioate linkage
  modified_base 16: mod_base = OTHER; note = 2'-O-methyl modified nucleotide with phosphorothioate linkage
  modified_base 17: mod_base = OTHER; note = 2'-O-methoxyethyl modified thymine with phosphorothioate linkage
  modified_base 18: mod_base = OTHER; note = 2'-O-methyl modified nucleotide with phosphorothioate linkage
  modified_base 19: mod_base = OTHER; note = 2'-O-methoxyethyl 5-methylcytosine with phosphorothioate linkage
  modified_base 20: mod_base = OTHER; note = 2'-O-methoxyethyl modified nucleotide
  misc_feature 1..5: note = RNA
  misc_feature 6..15: note = DNA
  misc_feature 16..20: note = RNA
cagaggtgaagcgaagtgca

SEQ ID NO: 150 - DNA, 20 bp, synthetic construct
  source 1..20: mol_type = other DNA
  modified_base 1: mod_base = OTHER; note = 2'-O-methoxyethyl 5-methylcytosine with phosphorothioate linkage
  modified_base 2: mod_base = OTHER; note = 2'-O-methoxyethyl modified nucleotide with phosphorothioate linkage
  modified_base 3: mod_base = OTHER; note = 2'-O-methoxyethyl modified nucleotide with phosphorothioate linkage
  modified_base 4: mod_base = OTHER; note = 2'-O-methoxyethyl modified nucleotide with phosphorothioate linkage
  modified_base 5: mod_base = OTHER; note = 2'-O-methyl modified nucleotide with phosphorothioate linkage
  modified_base 6: mod_base = OTHER; note = Nucleotide with phosphorothioate linkage
  modified_base 7: mod_base = OTHER; note = Thymine with phosphorothioate linkage
  modified_base 8: mod_base = OTHER; note = Nucleotide with phosphorothioate linkage
  modified_base 9: mod_base = OTHER; note = Nucleotide with phosphorothioate linkage
  modified_base 10: mod_base = OTHER; note = Nucleotide with phosphorothioate linkage
  modified_base 11: mod_base = OTHER; note = Nucleotide with phosphorothioate linkage
  modified_base 12: mod_base = OTHER; note = 5-methylcytosine with phosphorothioate linkage
  modified_base 13: mod_base = OTHER; note = Nucleotide with phosphorothioate linkage
  modified_base 14: mod_base = OTHER; note = Nucleotide with phosphorothioate linkage
  modified_base 15: mod_base = OTHER; note = Nucleotide with phosphorothioate linkage
  modified_base 16: mod_base = OTHER; note = 2'-O-methyl modified nucleotide with phosphorothioate linkage
  modified_base 17: mod_base = OTHER; note = 2'-O-methoxyethyl modified thymine with phosphorothioate linkage
  modified_base 18: mod_base = OTHER; note = 2'-O-methyl modified nucleotide with phosphorothioate linkage
  modified_base 19: mod_base = OTHER; note = 2'-O-methoxyethyl 5-methylcytosine with phosphorothioate linkage
  modified_base 20: mod_base = OTHER; note = 2'-O-methoxyethyl modified nucleotide
  misc_feature 1..5: note = RNA
  misc_feature 6..15: note = DNA
  misc_feature 16..20: note = RNA
cagaggtgaagcgaagtgca

SEQ ID NO: 151 - DNA, 20 bp, synthetic construct
  source 1..20: mol_type = other DNA
  modified_base 1: mod_base = OTHER; note = 2'-O-methoxyethyl 5-methylcytosine with phosphorothioate linkage
  modified_base 2: mod_base = OTHER; note = 2'-O-methoxyethyl modified nucleotide with phosphorothioate linkage
  modified_base 3: mod_base = OTHER; note = 2'-O-methyl modified nucleotide with phosphorothioate linkage
  modified_base 4: mod_base = OTHER; note = 2'-O-methoxyethyl modified nucleotide with phosphorothioate linkage
  modified_base 5: mod_base = OTHER; note = 2'-O-methyl modified nucleotide with phosphorothioate linkage
  modified_base 6: mod_base = OTHER; note = Nucleotide with phosphorothioate linkage
  modified_base 7: mod_base = OTHER; note = Thymine with phosphorothioate linkage
  modified_base 8: mod_base = OTHER; note = Nucleotide with phosphorothioate linkage
  modified_base 9: mod_base = OTHER; note = Nucleotide with phosphorothioate linkage
  modified_base 10: mod_base = OTHER; note = Nucleotide with phosphorothioate linkage
  modified_base 11: mod_base = OTHER; note = Nucleotide with phosphorothioate linkage
  modified_base 12: mod_base = OTHER; note = 5-methylcytosine with phosphorothioate linkage
  modified_base 13: mod_base = OTHER; note = Nucleotide with phosphorothioate linkage
  modified_base 14: mod_base = OTHER; note = Nucleotide with phosphorothioate linkage
  modified_base 15: mod_base = OTHER; note = Nucleotide with phosphorothioate linkage
  modified_base 16: mod_base = OTHER; note = 2'-O-methyl modified nucleotide with phosphorothioate linkage
  modified_base 17: mod_base = OTHER; note = 2'-O-methoxyethyl modified thymine with phosphorothioate linkage
  modified_base 18: mod_base = OTHER; note = 2'-O-methyl modified nucleotide with phosphorothioate linkage
  modified_base 19: mod_base = OTHER; note = 2'-O-methoxyethyl 5-methylcytosine with phosphorothioate linkage
  modified_base 20: mod_base = OTHER; note = 2'-O-methoxyethyl modified nucleotide
  misc_feature 1..5: note = RNA
  misc_feature 6..15: note = DNA
  misc_feature 16..20: note = RNA
cagaggtgaagcgaagtgca

SEQ ID NO: 152 - DNA, 20 bp, synthetic construct
  source 1..20: mol_type = other DNA
  modified_base 1: mod_base = OTHER; note = 2'-O-methoxyethyl 5-methylcytosine with phosphorothioate linkage
  modified_base 2: mod_base = OTHER; note = 2'-O-methoxyethyl modified nucleotide with phosphorothioate linkage
  modified_base 3: mod_base = OTHER; note = 2'-O-methoxyethyl modified nucleotide with phosphorothioate linkage
  modified_base 4: mod_base = OTHER; note = 2'-O-methoxyethyl modified nucleotide with phosphorothioate linkage
  modified_base 5: mod_base = OTHER; note = 2'-O-methoxyethyl modified nucleotide with phosphorothioate linkage
  modified_base 6: mod_base = OTHER; note = Nucleotide with phosphorothioate linkage
  modified_base 7: mod_base = OTHER; note = Thymine with phosphorothioate linkage
  modified_base 8: mod_base = OTHER; note = Nucleotide with phosphorothioate linkage
  modified_base 9: mod_base = OTHER; note = Nucleotide with phosphorothioate linkage
  modified_base 10: mod_base = OTHER; note = Nucleotide with phosphorothioate linkage
  modified_base 11: mod_base = OTHER; note = Nucleotide with phosphorothioate linkage
  modified_base 12: mod_base = OTHER; note = 5-methylcytosine with phosphorothioate linkage
  modified_base 13: mod_base = OTHER; note = Nucleotide with phosphorothioate linkage
  modified_base 14: mod_base = OTHER; note = Nucleotide with phosphorothioate linkage
  modified_base 15: mod_base = OTHER; note = Nucleotide with phosphorothioate linkage
  modified_base 16: mod_base = OTHER; note = 2'-O-methoxyethyl modified nucleotide with phosphorothioate linkage
  modified_base 17: mod_base = OTHER; note = 2'-O-methoxyethyl modified thymine with phosphorothioate linkage
  modified_base 18: mod_base = OTHER; note = 2'-O-methyl modified nucleotide with phosphorothioate linkage
  modified_base 19: mod_base = OTHER; note = 2'-O-methyl 5-methylcytosine with phosphorothioate linkage
  modified_base 20: mod_base = OTHER; note = 2'-O-methoxyethyl modified nucleotide
  misc_feature 1..5: note = RNA
  misc_feature 6..15: note = DNA
  misc_feature 16..20: note = RNA
cagaggtgaagcgaagtgca

SEQ ID NO: 153 - DNA, 20 bp, synthetic construct
  source 1..20: mol_type = other DNA
  modified_base 1: mod_base = OTHER; note = 2'-O-methoxyethyl 5-methylcytosine with phosphorothioate linkage
  modified_base 2: mod_base = OTHER; note = 2'-O-methoxyethyl modified nucleotide with phosphorothioate linkage
  modified_base 3: mod_base = OTHER; note = 2'-O-methoxyethyl modified nucleotide with phosphorothioate linkage
  modified_base 4: mod_base = OTHER; note = 2'-O-methoxyethyl modified nucleotide with phosphorothioate linkage
  modified_base 5: mod_base = OTHER; note = 2'-O-methoxyethyl modified nucleotide with phosphorothioate linkage
  modified_base 6: mod_base = OTHER; note = Nucleotide with phosphorothioate linkage
  modified_base 7: mod_base = OTHER; note = Thymine with phosphorothioate linkage
  modified_base 8: mod_base = OTHER; note = Nucleotide with phosphorothioate linkage
  modified_base 9: mod_base = OTHER; note = Nucleotide with phosphorothioate linkage
  modified_base 10: mod_base = OTHER; note = Nucleotide with phosphorothioate linkage
  modified_base 11: mod_base = OTHER; note = Nucleotide with phosphorothioate linkage
  modified_base 12: mod_base = OTHER; note = 5-methylcytosine with phosphorothioate linkage
  modified_base 13: mod_base = OTHER; note = Nucleotide with phosphorothioate linkage
  modified_base 14: mod_base = OTHER; note = Nucleotide with phosphorothioate linkage
  modified_base 15: mod_base = OTHER; note = Nucleotide with phosphorothioate linkage
  modified_base 16: mod_base = OTHER; note = 2'-O-methoxyethyl modified nucleotide with phosphorothioate linkage
  modified_base 17: mod_base = OTHER; note = 2'-O-methoxyethyl modified thymine with phosphorothioate linkage
  modified_base 18: mod_base = OTHER; note = 2'-O-methyl modified nucleotide with phosphorothioate linkage
  modified_base 19: mod_base = OTHER; note = 2'-O-methyl 5-methylcytosine with phosphorothioate linkage
  modified_base 20: mod_base = OTHER; note = 2'-O-methyl modified nucleotide
  misc_feature 1..5: note = RNA
  misc_feature 6..15: note = DNA
  misc_feature 16..20: note = RNA
cagaggtgaagcgaagtgca

SEQ ID NO: 154 - DNA, 20 bp, synthetic construct
  source 1..20: mol_type = other DNA
  modified_base 1: mod_base = OTHER; note = 2'-O-methoxyethyl 5-methylcytosine with phosphorothioate linkage
  modified_base 2: mod_base = OTHER; note = 2'-O-methoxyethyl modified nucleotide with phosphorothioate linkage
  modified_base 3: mod_base = OTHER; note = 2'-O-methoxyethyl modified nucleotide with phosphorothioate linkage
  modified_base 4: mod_base = OTHER; note = 2'-O-methoxyethyl modified nucleotide with phosphorothioate linkage
  modified_base 5: mod_base = OTHER; note = 2'-O-methoxyethyl modified nucleotide with phosphorothioate linkage
  modified_base 6: mod_base = OTHER; note = Nucleotide with phosphorothioate linkage
  modified_base 7: mod_base = OTHER; note = Thymine with phosphorothioate linkage
  modified_base 8: mod_base = OTHER; note = Nucleotide with phosphorothioate linkage
  modified_base 9: mod_base = OTHER; note = Nucleotide with phosphorothioate linkage
  modified_base 10: mod_base = OTHER; note = Nucleotide with phosphorothioate linkage
  modified_base 11: mod_base = OTHER; note = Nucleotide with phosphorothioate linkage
  modified_base 12: mod_base = OTHER; note = 5-methylcytosine with phosphorothioate linkage
  modified_base 13: mod_base = OTHER; note = Nucleotide with phosphorothioate linkage
  modified_base 14: mod_base = OTHER; note = Nucleotide with phosphorothioate linkage
  modified_base 15: mod_base = OTHER; note = Nucleotide with phosphorothioate linkage
  modified_base 16: mod_base = OTHER; note = 2'-O-methyl modified nucleotide with phosphorothioate linkage
  modified_base 17: mod_base = OTHER; note = 2'-O-methoxyethyl modified thymine with phosphorothioate linkage
  modified_base 18: mod_base = OTHER; note = 2'-O-methyl modified nucleotide with phosphorothioate linkage
  modified_base 19: mod_base = OTHER; note = 2'-O-methoxyethyl 5-methylcytosine with phosphorothioate linkage
  modified_base 20: mod_base = OTHER; note = 2'-O-methyl modified nucleotide
  misc_feature 1..5: note = RNA
  misc_feature 6..15: note = DNA
  misc_feature 16..20: note = RNA
cagaggtgaagcgaagtgca

SEQ ID NO: 155 - DNA, 20 bp, synthetic construct
  source 1..20: mol_type = other DNA
  modified_base 1: mod_base = OTHER; note = 2'-O-methoxyethyl modified nucleotide with phosphorothioate linkage
  modified_base 2: mod_base = OTHER; note = 2'-O-methoxyethyl modified nucleotide with phosphorothioate linkage
  modified_base 3: mod_base = OTHER; note = 2'-O-methoxyethyl modified nucleotide with phosphorothioate linkage
  modified_base 4: mod_base = OTHER; note = 2'-O-methoxyethyl modified nucleotide with phosphorothioate linkage
  modified_base 5: mod_base = OTHER; note = 2'-O-methoxyethyl modified nucleotide with phosphorothioate linkage
  modified_base 6: mod_base = OTHER; note = Nucleotide with S-stereo-defined phosphorothioate linkage
  modified_base 7: mod_base = OTHER; note = Thymine with phosphorothioate linkage
  modified_base 8: mod_base = OTHER; note = Nucleotide with phosphorothioate linkage
  modified_base 9: mod_base = OTHER; note = Nucleotide with phosphorothioate linkage
  modified_base 10: mod_base = OTHER; note = Nucleotide with phosphorothioate linkage
  modified_base 11: mod_base = OTHER; note = Nucleotide with phosphorothioate linkage
  modified_base 12: mod_base = OTHER; note = Nucleotide with phosphorothioate linkage
  modified_base 13: mod_base = OTHER; note = Nucleotide with phosphorothioate linkage
  modified_base 14: mod_base = OTHER; note = Nucleotide with phosphorothioate linkage
  modified_base 15: mod_base = OTHER; note = Nucleotide with phosphorothioate linkage
  modified_base 16: mod_base = OTHER; note = 2'-O-methoxyethyl modified nucleotide with phosphorothioate linkage
  modified_base 17: mod_base = OTHER; note = 2'-O-methoxyethyl modified thymine with phosphorothioate linkage
  modified_base 18: mod_base = OTHER; note = 2'-O-methoxyethyl modified nucleotide with phosphorothioate linkage
  modified_base 19: mod_base = OTHER; note = 2'-O-methoxyethyl modified nucleotide with phosphorothioate linkage
  modified_base 20: mod_base = OTHER; note = 2'-O-methoxyethyl modified nucleotide
  misc_feature 1..5: note = RNA
  misc_feature 6..15: note = DNA
  misc_feature 16..20: note = RNA
cagaggtgaagcgaagtgca

SEQ ID NO: 156 - DNA, 20 bp, synthetic construct
  source 1..20: mol_type = other DNA
  modified_base 1: mod_base = OTHER; note = 2'-O-methoxyethyl modified nucleotide with phosphorothioate linkage
  modified_base 2: mod_base = OTHER; note = 2'-O-methoxyethyl modified nucleotide with phosphorothioate linkage
  modified_base 3: mod_base = OTHER; note = 2'-O-methoxyethyl modified nucleotide with phosphorothioate linkage
  modified_base 4: mod_base = OTHER; note = 2'-O-methoxyethyl modified nucleotide with phosphorothioate linkage
  modified_base 5: mod_base = OTHER; note = 2'-O-methoxyethyl modified nucleotide with phosphorothioate linkage
  modified_base 6: mod_base = OTHER; note = Nucleotide with phosphorothioate linkage
  modified_base 7: mod_base = OTHER; note = Thymine with S-stereo-defined phosphorothioate linkage
  modified_base 8: mod_base = OTHER; note = Nucleotide with phosphorothioate linkage
  modified_base 9: mod_base = OTHER; note = Nucleotide with phosphorothioate linkage
  modified_base 10: mod_base = OTHER; note = Nucleotide with phosphorothioate linkage
  modified_base 11: mod_base = OTHER; note = Nucleotide with phosphorothioate linkage
  modified_base 12: mod_base = OTHER; note = Nucleotide with phosphorothioate linkage
  modified_base 13: mod_base = OTHER; note = Nucleotide with phosphorothioate linkage
  modified_base 14: mod_base = OTHER; note = Nucleotide with phosphorothioate linkage
  modified_base 15: mod_base = OTHER; note = Nucleotide with phosphorothioate linkage
  modified_base 16: mod_base = OTHER; note = 2'-O-methoxyethyl modified nucleotide with phosphorothioate linkage
  modified_base 17: mod_base = OTHER; note = 2'-O-methoxyethyl modified thymine with phosphorothioate linkage
  modified_base 18: mod_base = OTHER; note = 2'-O-methoxyethyl modified nucleotide with phosphorothioate linkage
  modified_base 19: mod_base = OTHER; note = 2'-O-methoxyethyl modified nucleotide with phosphorothioate linkage
  modified_base 20: mod_base = OTHER; note = 2'-O-methoxyethyl modified nucleotide
  misc_feature 1..5: note = RNA
  misc_feature 6..15: note = DNA
  misc_feature 16..20: note = RNA
cagaggtgaagcgaagtgca

SEQ ID NO: 157 - DNA, 20 bp, synthetic construct
  source 1..20: mol_type = other DNA
  modified_base 1: mod_base = OTHER; note = 2'-O-methoxyethyl modified nucleotide with phosphorothioate linkage
  modified_base 2: mod_base = OTHER; note = 2'-O-methoxyethyl modified nucleotide with phosphorothioate linkage
  modified_base 3: mod_base = OTHER; note = 2'-O-methoxyethyl modified nucleotide with phosphorothioate linkage
  modified_base 4: mod_base = OTHER; note = 2'-O-methoxyethyl modified nucleotide with phosphorothioate linkage
  modified_base 5: mod_base = OTHER; note = 2'-O-methoxyethyl modified nucleotide with phosphorothioate linkage
  modified_base 6: mod_base = OTHER; note = Nucleotide with phosphorothioate linkage
  modified_base 7: mod_base = OTHER; note = Thymine with phosphorothioate linkage
  modified_base 8: mod_base = OTHER; note = Nucleotide with S-stereo-defined phosphorothioate linkage
  modified_base 9: mod_base = OTHER; note = Nucleotide with phosphorothioate linkage
  modified_base 10: mod_base = OTHER; note = Nucleotide with phosphorothioate linkage
  modified_base 11: mod_base = OTHER; note = Nucleotide with phosphorothioate linkage
  modified_base 12: mod_base = OTHER; note = Nucleotide with phosphorothioate linkage
  modified_base 13: mod_base = OTHER; note = Nucleotide with phosphorothioate linkage
  modified_base 14: mod_base = OTHER; note = Nucleotide with phosphorothioate linkage
  modified_base 15: mod_base = OTHER; note = Nucleotide with phosphorothioate linkage
  modified_base 16: mod_base = OTHER; note = 2'-O-methoxyethyl modified nucleotide with phosphorothioate linkage
  modified_base 17: mod_base = OTHER; note = 2'-O-methoxyethyl modified thymine with phosphorothioate linkage
  modified_base 18: mod_base = OTHER; note = 2'-O-methoxyethyl modified nucleotide with phosphorothioate linkage
  modified_base 19: mod_base = OTHER; note = 2'-O-methoxyethyl modified nucleotide with phosphorothioate linkage
  modified_base 20: mod_base = OTHER; note = 2'-O-methoxyethyl modified nucleotide
  misc_feature 1..5: note = RNA
  misc_feature 6..15: note = DNA
  misc_feature 16..20: note = RNA
cagaggtgaagcgaagtgca

SEQ ID NO: 158 - DNA, 20 bp, synthetic construct
  source 1..20: mol_type = other DNA
  modified_base 1: mod_base = OTHER; note = 2'-O-methoxyethyl modified nucleotide with phosphorothioate linkage
  modified_base 2: mod_base = OTHER; note = 2'-O-methoxyethyl modified nucleotide with phosphorothioate linkage
  modified_base 3: mod_base = OTHER; note = 2'-O-methoxyethyl modified nucleotide with phosphorothioate linkage
  modified_base 4: mod_base = OTHER; note = 2'-O-methoxyethyl modified nucleotide with phosphorothioate linkage
  modified_base 5: mod_base = OTHER; note = 2'-O-methoxyethyl modified nucleotide with phosphorothioate linkage
  modified_base 6: mod_base = OTHER; note = Nucleotide with phosphorothioate linkage
  modified_base 7: mod_base = OTHER; note = Thymine with phosphorothioate linkage
  modified_base 8: mod_base = OTHER; note = Nucleotide with phosphorothioate linkage
  modified_base 9: mod_base = OTHER; note = Nucleotide with S-stereo-defined phosphorothioate linkage
  modified_base 10: mod_base = OTHER; note = Nucleotide with phosphorothioate linkage
  modified_base 11: mod_base = OTHER; note = Nucleotide with phosphorothioate linkage
  modified_base 12: mod_base = OTHER; note = Nucleotide with phosphorothioate linkage
  modified_base 13: mod_base = OTHER; note = Nucleotide with phosphorothioate linkage
  modified_base 14: mod_base = OTHER; note = Nucleotide with phosphorothioate linkage
  modified_base 15: mod_base = OTHER; note = Nucleotide with phosphorothioate linkage
  modified_base 16: mod_base = OTHER; note = 2'-O-methoxyethyl modified nucleotide with phosphorothioate linkage
  modified_base 17: mod_base = OTHER; note = 2'-O-methoxyethyl modified thymine with phosphorothioate linkage
  modified_base 18: mod_base = OTHER; note = 2'-O-methoxyethyl modified nucleotide with phosphorothioate linkage
  modified_base 19: mod_base = OTHER; note = 2'-O-methoxyethyl modified nucleotide with phosphorothioate linkage
  modified_base 20: mod_base = OTHER; note = 2'-O-methoxyethyl modified nucleotide
  misc_feature 1..5: note = RNA
  misc_feature 6..15: note = DNA
  misc_feature 16..20: note = RNA
cagaggtgaagcgaagtgca

SEQ ID NO: 159 - DNA, 20 bp, synthetic construct
  source 1..20: mol_type = other DNA
  modified_base 1: mod_base = OTHER; note = 2'-O-methoxyethyl modified nucleotide with phosphorothioate linkage
  modified_base 2: mod_base = OTHER; note = 2'-O-methoxyethyl modified nucleotide with phosphorothioate linkage
  modified_base 3: mod_base = OTHER; note = 2'-O-methoxyethyl modified nucleotide with phosphorothioate linkage
  modified_base 4: mod_base = OTHER; note = 2'-O-methoxyethyl modified nucleotide with phosphorothioate linkage
  modified_base 5: mod_base = OTHER; note = 2'-O-methoxyethyl modified nucleotide with phosphorothioate linkage
  modified_base 6: mod_base = OTHER; note = Nucleotide with phosphorothioate linkage
  modified_base 7: mod_base = OTHER; note = Thymine with phosphorothioate linkage
  modified_base 8: mod_base = OTHER; note = Nucleotide with phosphorothioate linkage
  modified_base 9: mod_base = OTHER; note = Nucleotide with phosphorothioate linkage
  modified_base 10: mod_base = OTHER; note = Nucleotide with S-stereo-defined phosphorothioate linkage
  modified_base 11: mod_base = OTHER; note = Nucleotide with phosphorothioate linkage
  modified_base 12: mod_base = OTHER; note = Nucleotide with phosphorothioate linkage
  modified_base 13: mod_base = OTHER; note = Nucleotide with phosphorothioate linkage
  modified_base 14: mod_base = OTHER; note = Nucleotide with phosphorothioate linkage
  modified_base 15: mod_base = OTHER; note = Nucleotide with phosphorothioate linkage
  modified_base 16: mod_base = OTHER; note = 2'-O-methoxyethyl modified nucleotide with phosphorothioate linkage
  modified_base 17: mod_base = OTHER; note = 2'-O-methoxyethyl modified thymine with phosphorothioate linkage
  modified_base 18: mod_base = OTHER; note = 2'-O-methoxyethyl modified nucleotide with phosphorothioate linkage
  modified_base 19: mod_base = OTHER; note = 2'-O-methoxyethyl modified nucleotide with phosphorothioate linkage
  modified_base 20: mod_base = OTHER; note = 2'-O-methoxyethyl modified nucleotide
  misc_feature 1..5: note = RNA
  misc_feature 6..15: note = DNA
  misc_feature 16..20: note = RNA
cagaggtgaagcgaagtgca

SEQ ID NO: 160 - DNA, 20 bp, synthetic construct
  source 1..20: mol_type = other DNA
  modified_base 1: mod_base = OTHER; note = 2'-O-methoxyethyl modified nucleotide with phosphorothioate linkage
  modified_base 2: mod_base = OTHER; note = 2'-O-methoxyethyl modified nucleotide with phosphorothioate linkage
  modified_base 3: mod_base = OTHER; note = 2'-O-methoxyethyl modified nucleotide with phosphorothioate linkage
  modified_base 4: mod_base = OTHER; note = 2'-O-methoxyethyl modified nucleotide with phosphorothioate linkage
  modified_base 5: mod_base = OTHER; note = 2'-O-methoxyethyl modified nucleotide with phosphorothioate linkage
  modified_base 6: mod_base = OTHER; note = Nucleotide with phosphorothioate linkage
  modified_base 7: mod_base = OTHER; note = Thymine with phosphorothioate linkage
  modified_base 8: mod_base = OTHER; note = Nucleotide with phosphorothioate linkage
  modified_base 9: mod_base = OTHER; note = Nucleotide with phosphorothioate linkage
  modified_base 10: mod_base = OTHER; note = Nucleotide with phosphorothioate linkage
  modified_base 11: mod_base = OTHER; note = Nucleotide with S-stereo-defined phosphorothioate linkage
  modified_base 12: mod_base = OTHER; note = Nucleotide with phosphorothioate linkage
  modified_base 13: mod_base = OTHER; note = Nucleotide with phosphorothioate linkage
  modified_base 14: mod_base = OTHER; note = Nucleotide with phosphorothioate linkage
  modified_base 15: mod_base = OTHER; note = Nucleotide with phosphorothioate linkage
  modified_base 16: mod_base = OTHER; note = 2'-O-methoxyethyl modified nucleotide with phosphorothioate linkage
  modified_base 17: mod_base = OTHER; note = 2'-O-methoxyethyl modified thymine with phosphorothioate linkage
  modified_base 18: mod_base = OTHER; note = 2'-O-methoxyethyl modified nucleotide with phosphorothioate linkage
  modified_base 19: mod_base = OTHER; note = 2'-O-methoxyethyl modified nucleotide with phosphorothioate linkage
  modified_base 20: mod_base = OTHER; note = 2'-O-methoxyethyl modified nucleotide
  misc_feature 1..5: note = RNA
  misc_feature 6..15: note = DNA
  misc_feature 16..20: note = RNA
cagaggtgaagcgaagtgca

SEQ ID NO: 161 - DNA, 20 bp, synthetic construct
  source 1..20: mol_type = other DNA
  modified_base 1: mod_base = OTHER; note = 2'-O-methoxyethyl modified nucleotide with phosphorothioate linkage
  modified_base 2: mod_base = OTHER; note = 2'-O-methoxyethyl modified nucleotide with phosphorothioate linkage
  modified_base 3: mod_base = OTHER; note = 2'-O-methoxyethyl modified nucleotide with phosphorothioate linkage
  modified_base 4: mod_base = OTHER; note = 2'-O-methoxyethyl modified nucleotide with phosphorothioate linkage
  modified_base 5: mod_base = OTHER; note = 2'-O-methoxyethyl modified nucleotide with phosphorothioate linkage
  modified_base 6: mod_base = OTHER; note = Nucleotide with phosphorothioate linkage
  modified_base 7: mod_base = OTHER; note = Thymine with phosphorothioate linkage
  modified_base 8: mod_base = OTHER; note = Nucleotide with phosphorothioate linkage
  modified_base 9: mod_base = OTHER; note = Nucleotide with phosphorothioate linkage
  modified_base 10: mod_base = OTHER; note = Nucleotide with phosphorothioate linkage
  modified_base 11: mod_base = OTHER; note = Nucleotide with phosphorothioate linkage
  modified_base 12: mod_base = OTHER; note = Nucleotide with S-stereo-defined phosphorothioate linkage
  modified_base 13: mod_base = OTHER; note = Nucleotide with phosphorothioate linkage
  modified_base 14: mod_base = OTHER; note = Nucleotide with phosphorothioate linkage
  modified_base 15: mod_base = OTHER; note = Nucleotide with phosphorothioate linkage
  modified_base 16: mod_base = OTHER; note = 2'-O-methoxyethyl modified nucleotide with phosphorothioate linkage
  modified_base 17: mod_base = OTHER; note = 2'-O-methoxyethyl modified thymine with phosphorothioate linkage
  modified_base 18: mod_base = OTHER; note = 2'-O-methoxyethyl modified nucleotide with phosphorothioate linkage
  modified_base 19: mod_base = OTHER; note = 2'-O-methoxyethyl modified nucleotide with phosphorothioate linkage
  modified_base 20: mod_base = OTHER; note = 2'-O-methoxyethyl modified nucleotide
  misc_feature 1..5: note = RNA
  misc_feature 6..15: note = DNA
  misc_feature 16..20: note = RNA
cagaggtgaagcgaagtgca

SEQ ID NO: 162 - DNA, 20 bp, synthetic construct
  source 1..20: mol_type = other DNA
  modified_base 1: mod_base = OTHER; note = 2'-O-methoxyethyl modified nucleotide with phosphorothioate linkage
  modified_base 2: mod_base = OTHER; note = 2'-O-methoxyethyl modified nucleotide with phosphorothioate linkage
  modified_base 3: mod_base = OTHER; note = 2'-O-methoxyethyl modified nucleotide with phosphorothioate linkage
  modified_base 4: mod_base = OTHER; note = 2'-O-methoxyethyl modified nucleotide with phosphorothioate linkage
  modified_base 5: mod_base = OTHER; note = 2'-O-methoxyethyl modified nucleotide with phosphorothioate linkage
  modified_base 6: mod_base = OTHER; note = Nucleotide with phosphorothioate linkage
  modified_base 7: mod_base = OTHER; note = Thymine with phosphorothioate linkage
  modified_base 8: mod_base = OTHER; note = Nucleotide with phosphorothioate linkage
  modified_base 9: mod_base = OTHER; note = Nucleotide with phosphorothioate linkage
  modified_base 10: mod_base = OTHER; note = Nucleotide with phosphorothioate linkage
  modified_base 11: mod_base = OTHER; note = Nucleotide with phosphorothioate linkage
  modified_base 12: mod_base = OTHER; note = Nucleotide with phosphorothioate linkage
  modified_base 13: mod_base = OTHER; note = Nucleotide with S-stereo-defined phosphorothioate linkage
  modified_base 14: mod_base = OTHER; note = Nucleotide with phosphorothioate linkage
  modified_base 15: mod_base = OTHER; note = Nucleotide with phosphorothioate linkage
  modified_base 16: mod_base = OTHER; note = 2'-O-methoxyethyl modified nucleotide with phosphorothioate linkage
  modified_base 17: mod_base = OTHER; note = 2'-O-methoxyethyl modified thymine with phosphorothioate linkage
  modified_base 18: mod_base = OTHER; note = 2'-O-methoxyethyl modified nucleotide with phosphorothioate linkage
  modified_base 19: mod_base = OTHER; note = 2'-O-methoxyethyl modified nucleotide with phosphorothioate linkage
  modified_base 20: mod_base = OTHER; note = 2'-O-methoxyethyl modified nucleotide
  misc_feature 1..5: note = RNA
  misc_feature 6..15: note = DNA
  misc_feature 16..20: note = RNA
cagaggtgaagcgaagtgca

SEQ ID NO: 163 - DNA, 20 bp, synthetic construct
  source 1..20: mol_type = other DNA
  modified_base 1: mod_base = OTHER; note = 2'-O-methoxyethyl modified nucleotide with phosphorothioate linkage
  modified_base 2: mod_base = OTHER; note = 2'-O-methoxyethyl modified nucleotide with phosphorothioate linkage
  modified_base 3: mod_base = OTHER; note = 2'-O-methoxyethyl modified nucleotide with phosphorothioate linkage
  modified_base 4: mod_base = OTHER; note = 2'-O-methoxyethyl modified nucleotide with phosphorothioate linkage
  modified_base 5: mod_base = OTHER; note = 2'-O-methoxyethyl modified nucleotide with phosphorothioate linkage
  modified_base 6: mod_base = OTHER; note = Nucleotide with phosphorothioate linkage
  modified_base 7: mod_base = OTHER; note = Thymine with phosphorothioate linkage
  modified_base 8: mod_base = OTHER; note = Nucleotide with phosphorothioate linkage
  modified_base 9: mod_base = OTHER; note = Nucleotide with phosphorothioate linkage
  modified_base 10: mod_base = OTHER; note = Nucleotide with phosphorothioate linkage
  modified_base 11: mod_base = OTHER; note = Nucleotide with phosphorothioate linkage
  modified_base 12: mod_base = OTHER; note = Nucleotide with phosphorothioate linkage
  modified_base 13: mod_base = OTHER; note = Nucleotide with phosphorothioate linkage
  modified_base 14: mod_base = OTHER; note = Nucleotide with S-stereo-defined phosphorothioate linkage
  modified_base 15: mod_base = OTHER; note = Nucleotide with phosphorothioate linkage
  modified_base 16: mod_base = OTHER; note = 2'-O-methoxyethyl modified nucleotide with phosphorothioate linkage
  modified_base 17: mod_base = OTHER; note = 2'-O-methoxyethyl modified thymine with phosphorothioate linkage
  modified_base 18: mod_base = OTHER; note = 2'-O-methoxyethyl modified nucleotide with phosphorothioate linkage
  modified_base 19: mod_base = OTHER; note = 2'-O-methoxyethyl modified nucleotide with phosphorothioate linkage
  modified_base 20: mod_base = OTHER; note = 2'-O-methoxyethyl modified nucleotide
  misc_feature 1..5: note = RNA
  misc_feature 6..15: note = DNA
  misc_feature 16..20: note = RNA
cagaggtgaagcgaagtgca

SEQ ID NO: 164 - DNA, 20 bp, synthetic construct
  source 1..20: mol_type = other DNA
  modified_base 1: mod_base = OTHER; note = 2'-O-methoxyethyl modified nucleotide with phosphorothioate linkage
  modified_base 2: mod_base = OTHER; note = 2'-O-methoxyethyl modified nucleotide with phosphorothioate linkage
  modified_base 3: mod_base = OTHER; note = 2'-O-methoxyethyl modified nucleotide with phosphorothioate linkage
  modified_base 4: mod_base = OTHER; note = 2'-O-methoxyethyl modified nucleotide with phosphorothioate linkage
  modified_base 5: mod_base = OTHER; note = 2'-O-methoxyethyl modified nucleotide with phosphorothioate linkage
  modified_base 6: mod_base = OTHER; note = Nucleotide with phosphorothioate linkage
  modified_base 7: mod_base = OTHER; note = Thymine with phosphorothioate linkage
  modified_base 8: mod_base = OTHER; note = Nucleotide with phosphorothioate linkage
  modified_base 9: mod_base = OTHER; note = Nucleotide with phosphorothioate linkage
  modified_base 10: mod_base = OTHER; note = Nucleotide with phosphorothioate linkage
  modified_base 11: mod_base = OTHER; note = Nucleotide with phosphorothioate linkage
  modified_base 12: mod_base = OTHER; note = Nucleotide with phosphorothioate linkage
  modified_base 13: mod_base = OTHER; note = Nucleotide with phosphorothioate linkage
  modified_base 14: mod_base = OTHER; note = Nucleotide with phosphorothioate linkage
  modified_base 15: mod_base = OTHER; note = Nucleotide with S-stereo-defined phosphorothioate linkage
  modified_base 16: mod_base = OTHER; note = 2'-O-methoxyethyl modified nucleotide with phosphorothioate linkage
  modified_base 17: mod_base = OTHER; note = 2'-O-methoxyethyl modified thymine with phosphorothioate linkage
  modified_base 18: mod_base = OTHER; note = 2'-O-methoxyethyl modified nucleotide with phosphorothioate linkage
  modified_base 19: mod_base = OTHER; note = 2'-O-methoxyethyl modified nucleotide with phosphorothioate linkage
  modified_base 20: mod_base = OTHER; note = 2'-O-methoxyethyl modified nucleotide
  misc_feature 1..5: note = RNA
  misc_feature 6..15: note = DNA
  misc_feature 16..20: note = RNA
cagaggtgaagcgaagtgca

SEQ ID NO: 165 - DNA, 20 bp, synthetic construct
  source 1..20: mol_type = other DNA
  modified_base 1: mod_base = OTHER; note = Locked nucleic acid with phosphorothioate linkage
  modified_base 2: mod_base = OTHER; note = 2'-O-methoxyethyl modified nucleotide with phosphorothioate linkage
  modified_base 3: mod_base = OTHER; note = 2'-O-methoxyethyl modified nucleotide with phosphorothioate linkage
  modified_base 4: mod_base = OTHER; note = 2'-O-methoxyethyl modified nucleotide with phosphorothioate linkage
  modified_base 5: mod_base = OTHER; note = 2'-O-methoxyethyl modified nucleotide with phosphorothioate linkage
  modified_base 6: mod_base = OTHER; note = Nucleotide with phosphorothioate linkage
  modified_base 7: mod_base = OTHER; note = Thymine with phosphorothioate linkage
  modified_base 8: mod_base = OTHER; note = Nucleotide with phosphorothioate linkage
  modified_base 9: mod_base = OTHER; note = Nucleotide with phosphorothioate linkage
  modified_base 10: mod_base = OTHER; note = Nucleotide with phosphorothioate linkage
  modified_base 11: mod_base = OTHER; note = Nucleotide with phosphorothioate linkage
  modified_base 12: mod_base = OTHER; note = Nucleotide with phosphorothioate linkage
  modified_base 13: mod_base = OTHER; note = Nucleotide with phosphorothioate linkage
  modified_base 14: mod_base = OTHER; note = Nucleotide with phosphorothioate linkage
  modified_base 15: mod_base = OTHER; note = Nucleotide with phosphorothioate linkage
  modified_base 16: mod_base = OTHER; note = 2'-O-methoxyethyl modified nucleotide with phosphorothioate linkage
  modified_base 17: mod_base = OTHER; note = 2'-O-methoxyethyl modified thymine with phosphorothioate linkage
  modified_base 18: mod_base = OTHER; note = 2'-O-methoxyethyl modified nucleotide with phosphorothioate linkage
  modified_base 19: mod_base = OTHER; note = 2'-O-methoxyethyl modified nucleotide with phosphorothioate linkage
  modified_base 20: mod_base = OTHER; note = 2'-O-methoxyethyl modified nucleotide
  misc_feature 1..5: note = RNA
  misc_feature 6..15: note = DNA
  misc_feature 16..20: note = RNA
cagaggtgaagcgaagtgca

SEQ ID NO: 166 - DNA, 20 bp, synthetic construct
  source 1..20: mol_type = other DNA
  modified_base 1: mod_base = OTHER; note = 2'-O-methoxyethyl modified nucleotide with phosphorothioate linkage
  modified_base 2: mod_base = OTHER; note = Locked nucleic acid with phosphorothioate linkage
  modified_base 3: mod_base = OTHER; note = 2'-O-methoxyethyl modified nucleotide with phosphorothioate linkage
  modified_base 4: mod_base = OTHER; note = 2'-O-methoxyethyl modified nucleotide with phosphorothioate linkage
  modified_base 5: mod_base = OTHER; note = 2'-O-methoxyethyl modified nucleotide with phosphorothioate linkage
  modified_base 6: mod_base = OTHER; note = Nucleotide with phosphorothioate linkage
  modified_base 7: mod_base = OTHER; note = Thymine with phosphorothioate linkage
  modified_base 8: mod_base = OTHER; note = Nucleotide with phosphorothioate linkage
  modified_base 9: mod_base = OTHER; note = Nucleotide with phosphorothioate linkage
  modified_base 10: mod_base = OTHER; note = Nucleotide with phosphorothioate linkage
  modified_base 11: mod_base = OTHER; note = Nucleotide with phosphorothioate linkage
  modified_base 12: mod_base = OTHER; note = Nucleotide with phosphorothioate linkage
  modified_base 13: mod_base = OTHER; note = Nucleotide with phosphorothioate linkage
  modified_base 14: mod_base = OTHER; note = Nucleotide with phosphorothioate linkage
  modified_base 15: mod_base = OTHER; note = Nucleotide with phosphorothioate linkage
  modified_base 16: mod_base = OTHER; note = 2'-O-methoxyethyl modified nucleotide with phosphorothioate linkage
  modified_base 17: mod_base = OTHER; note = 2'-O-methoxyethyl modified thymine with phosphorothioate linkage
  modified_base 18: mod_base = OTHER; note = 2'-O-methoxyethyl modified nucleotide with phosphorothioate linkage
  modified_base 19: mod_base = OTHER; note = 2'-O-methoxyethyl modified nucleotide with phosphorothioate linkage
  modified_base 20: mod_base = OTHER; note = 2'-O-methoxyethyl modified nucleotide
  misc_feature 1..5: note = RNA
  misc_feature 6..15: note = DNA
  misc_feature 16..20: note = RNA
cagaggtgaagcgaagtgca

SEQ ID NO: 167 - DNA, 20 bp, synthetic construct
  source 1..20: mol_type = other DNA
  modified_base 1: mod_base = OTHER; note = 2'-O-methoxyethyl modified nucleotide with phosphorothioate linkage
  modified_base 2: mod_base = OTHER; note = 2'-O-methoxyethyl modified nucleotide with phosphorothioate linkage
  modified_base 3: mod_base = OTHER; note = Locked nucleic acid with phosphorothioate linkage
  modified_base 4: mod_base = OTHER; note = 2'-O-methoxyethyl modified nucleotide with phosphorothioate linkage
  modified_base 5: mod_base = OTHER; note = 2'-O-methoxyethyl modified nucleotide with phosphorothioate linkage
  modified_base 6: mod_base = OTHER; note = Nucleotide with phosphorothioate linkage
  modified_base 7: mod_base = OTHER; note = Thymine with phosphorothioate linkage
  modified_base 8: mod_base = OTHER; note = Nucleotide with phosphorothioate linkage
  modified_base 9: mod_base = OTHER; note = Nucleotide with phosphorothioate linkage
  modified_base 10: mod_base = OTHER; note = Nucleotide with phosphorothioate linkage
  modified_base 11: mod_base = OTHER; note = Nucleotide with phosphorothioate linkage
  modified_base 12: mod_base = OTHER; note = Nucleotide with phosphorothioate linkage
  modified_base 13: mod_base = OTHER; note = Nucleotide with phosphorothioate linkage
  modified_base 14: mod_base = OTHER; note = Nucleotide with phosphorothioate linkage
  modified_base 15: mod_base = OTHER; note = Nucleotide with phosphorothioate linkage
  modified_base 16: mod_base = OTHER; note = 2'-O-methoxyethyl modified nucleotide with phosphorothioate linkage
  modified_base 17: mod_base = OTHER; note = 2'-O-methoxyethyl modified thymine with phosphorothioate linkage
  modified_base 18: mod_base = OTHER; note = 2'-O-methoxyethyl modified nucleotide with phosphorothioate linkage
  modified_base 19: mod_base = OTHER; note = 2'-O-methoxyethyl modified nucleotide with phosphorothioate linkage
  modified_base 20: mod_base = OTHER; note = 2'-O-methoxyethyl modified nucleotide
  misc_feature 1..5: note = RNA
  misc_feature 6..15: note = DNA
  misc_feature 16..20: note = RNA
cagaggtgaagcgaagtgca

SEQ ID NO: 168 - DNA, 20 bp, synthetic construct
  source 1..20: mol_type = other DNA
  modified_base 1: mod_base = OTHER; note = 2'-O-methoxyethyl modified nucleotide with phosphorothioate linkage
  modified_base 2: mod_base = OTHER; note = 2'-O-methoxyethyl modified nucleotide with phosphorothioate linkage
  modified_base 3: mod_base = OTHER; note = 2'-O-methoxyethyl modified nucleotide with phosphorothioate linkage
  modified_base 4: mod_base = OTHER; note = Locked nucleic acid with phosphorothioate linkage
  modified_base 5: mod_base = OTHER; note = 2'-O-methoxyethyl modified nucleotide with phosphorothioate linkage
  modified_base 6: mod_base = OTHER; note = Nucleotide with phosphorothioate linkage
  modified_base 7: mod_base = OTHER; note = Thymine with phosphorothioate linkage
  modified_base 8: mod_base = OTHER; note = Nucleotide with phosphorothioate linkage
  modified_base 9: mod_base = OTHER; note = Nucleotide with phosphorothioate linkage
  modified_base 10: mod_base = OTHER; note = Nucleotide with phosphorothioate linkage
  modified_base 11: mod_base = OTHER; note = Nucleotide with phosphorothioate linkage
  modified_base 12: mod_base = OTHER; note = Nucleotide with phosphorothioate linkage
  modified_base 13: mod_base = OTHER; note = Nucleotide with phosphorothioate linkage
  modified_base 14: mod_base = OTHER; note = Nucleotide with phosphorothioate linkage
  modified_base 15: mod_base = OTHER; note = Nucleotide with phosphorothioate linkage
  modified_base 16: mod_base = OTHER; note = 2'-O-methoxyethyl modified nucleotide with phosphorothioate linkage
  modified_base 17: mod_base = OTHER; note = 2'-O-methoxyethyl modified thymine with phosphorothioate linkage
  modified_base 18: mod_base = OTHER; note = 2'-O-methoxyethyl modified nucleotide with phosphorothioate linkage
  modified_base 19: mod_base = OTHER; note = 2'-O-methoxyethyl modified nucleotide with phosphorothioate linkage
  modified_base 20: mod_base = OTHER; note = 2'-O-methoxyethyl modified nucleotide
  misc_feature 1..5: note = RNA
  misc_feature 6..15: note = DNA
  misc_feature 16..20: note = RNA
cagaggtgaagcgaagtgca

SEQ ID NO: 169 - DNA, 20 bp, synthetic construct
  source 1..20: mol_type = other DNA
  modified_base 1: mod_base = OTHER; note = 2'-O-methoxyethyl modified nucleotide with phosphorothioate linkage
  modified_base 2: mod_base = OTHER; note = 2'-O-methoxyethyl modified nucleotide with phosphorothioate linkage
  modified_base 3: mod_base = OTHER; note = 2'-O-methoxyethyl modified nucleotide with phosphorothioate linkage
  modified_base 4: mod_base = OTHER; note = 2'-O-methoxyethyl modified nucleotide with phosphorothioate linkage
  modified_base 5: mod_base = OTHER; note = Locked nucleic acid with phosphorothioate linkage
  modified_base 6: mod_base = OTHER; note = Nucleotide with phosphorothioate linkage
  modified_base 7: mod_base = OTHER; note = Thymine with phosphorothioate linkage
  modified_base 8: mod_base = OTHER; note = Nucleotide with phosphorothioate linkage
  modified_base 9: mod_base = OTHER; note = Nucleotide with phosphorothioate linkage
  modified_base 10: mod_base = OTHER; note = Nucleotide with phosphorothioate linkage
  modified_base 11: mod_base = OTHER; note = Nucleotide with phosphorothioate linkage
  modified_base 12: mod_base = OTHER; note = Nucleotide with phosphorothioate linkage
  modified_base 13: mod_base = OTHER; note = Nucleotide with phosphorothioate linkage
  modified_base 14: mod_base = OTHER; note = Nucleotide with phosphorothioate linkage
  modified_base 15: mod_base = OTHER; note = Nucleotide with phosphorothioate linkage
  modified_base 16: mod_base = OTHER; note = 2'-O-methoxyethyl modified nucleotide with phosphorothioate linkage
  modified_base 17: mod_base = OTHER; note = 2'-O-methoxyethyl modified thymine with phosphorothioate linkage
  modified_base 18: mod_base = OTHER; note = 2'-O-methoxyethyl modified nucleotide with phosphorothioate linkage
  modified_base 19: mod_base = OTHER; note = 2'-O-methoxyethyl modified nucleotide with phosphorothioate linkage
  modified_base 20: mod_base = OTHER; note = 2'-O-methoxyethyl modified nucleotide
  misc_feature 1..5: note = RNA
  misc_feature 6..15: note = DNA
  misc_feature 16..20: note = RNA
cagaggtgaagcgaagtgca

SEQ ID NO: 170 - DNA, 20 bp, synthetic construct
  source 1..20: mol_type = other DNA
  modified_base 1: mod_base = OTHER; note = 2'-O-methoxyethyl modified nucleotide with phosphorothioate linkage
  modified_base 2: mod_base = OTHER; note = 2'-O-methoxyethyl modified nucleotide with phosphorothioate linkage
  modified_base 3: mod_base = OTHER; note = 2'-O-methoxyethyl modified nucleotide with phosphorothioate linkage
  modified_base 4: mod_base = OTHER; note = 2'-O-methoxyethyl modified nucleotide with phosphorothioate linkage
  modified_base 5: mod_base = OTHER; note = 2'-O-methoxyethyl modified nucleotide with phosphorothioate linkage
  modified_base 6: mod_base = OTHER; note = Nucleotide with phosphorothioate linkage
  modified_base 7: mod_base = OTHER; note = Thymine with phosphorothioate linkage
  modified_base 8: mod_base = OTHER; note = Nucleotide with phosphorothioate linkage
  modified_base 9: mod_base = OTHER; note = Nucleotide with phosphorothioate linkage
  modified_base 10: mod_base = OTHER; note = Nucleotide with phosphorothioate linkage
  modified_base 11: mod_base = OTHER; note = Nucleotide with phosphorothioate linkage
  modified_base 12: mod_base = OTHER; note = Nucleotide with phosphorothioate linkage
  modified_base 13: mod_base = OTHER; note = Nucleotide with phosphorothioate linkage
  modified_base 14: mod_base = OTHER; note = Nucleotide with phosphorothioate linkage
  modified_base 15: mod_base = OTHER; note = Nucleotide with phosphorothioate linkage
  modified_base 16: mod_base = OTHER; note = Locked nucleic acid with phosphorothioate linkage
  modified_base 17: mod_base = OTHER; note = 2'-O-methoxyethyl modified thymine with phosphorothioate linkage
  modified_base 18: mod_base = OTHER; note = 2'-O-methoxyethyl modified nucleotide with phosphorothioate linkage
  modified_base 19: mod_base = OTHER; note = 2'-O-methoxyethyl modified nucleotide with phosphorothioate linkage
  modified_base 20: mod_base = OTHER; note = 2'-O-methoxyethyl modified nucleotide
  misc_feature 1..5: note = RNA
  misc_feature 6..15: note = DNA
  misc_feature 16..20: note = RNA
cagaggtgaagcgaagtgca

SEQ ID NO: 171 - DNA, 20 bp, synthetic construct
  source 1..20: mol_type = other DNA
  modified_base 1: mod_base = OTHER; note = 2'-O-methoxyethyl modified nucleotide with phosphorothioate linkage
  modified_base 2: mod_base = OTHER; note = 2'-O-methoxyethyl modified nucleotide with phosphorothioate linkage
  modified_base 3: mod_base = OTHER; note = 2'-O-methoxyethyl modified nucleotide with phosphorothioate linkage
  modified_base 4: mod_base = OTHER; note = 2'-O-methoxyethyl modified nucleotide with phosphorothioate linkage
  modified_base 5: mod_base = OTHER; note = 2'-O-methoxyethyl modified nucleotide with phosphorothioate linkage
  modified_base 6: mod_base = OTHER; note = Nucleotide with phosphorothioate linkage
  modified_base 7: mod_base = OTHER; note = Thymine with phosphorothioate linkage
  modified_base 8: mod_base = OTHER; note = Nucleotide with phosphorothioate linkage
  modified_base 9: mod_base = OTHER; note = Nucleotide with phosphorothioate linkage
  modified_base 10: mod_base = OTHER; note = Nucleotide with phosphorothioate linkage
  modified_base 11: mod_base = OTHER; note = Nucleotide with phosphorothioate linkage
  modified_base 12: mod_base = OTHER; note = Nucleotide with phosphorothioate linkage
  modified_base 13: mod_base = OTHER; note = Nucleotide with phosphorothioate linkage
  modified_base 14: mod_base = OTHER; note = Nucleotide with phosphorothioate linkage
  modified_base 15: mod_base = OTHER; note = Nucleotide with phosphorothioate linkage
  modified_base 16: mod_base = OTHER; note = 2'-O-methoxyethyl modified nucleotide with phosphorothioate linkage
  modified_base 17: mod_base = OTHER; note = Locked thymine with phosphorothioate linkage
  modified_base 18: mod_base = OTHER; note = 2'-O-methoxyethyl modified nucleotide with phosphorothioate linkage
  modified_base 19: mod_base = OTHER; note = 2'-O-methoxyethyl modified nucleotide with phosphorothioate linkage
  modified_base 20: mod_base = OTHER; note = 2'-O-methoxyethyl modified nucleotide
  misc_feature 1..5: note = RNA
  misc_feature 6..15: note = DNA
  misc_feature 16..20: note = RNA
cagaggtgaagcgaagtgca

SEQ ID NO: 172 - DNA, 20 bp, synthetic construct
  source 1..20: mol_type = other DNA
  modified_base 1: mod_base = OTHER; note = 2'-O-methoxyethyl modified nucleotide with phosphorothioate linkage
  modified_base 2: mod_base = OTHER; note = 2'-O-methoxyethyl modified nucleotide with phosphorothioate linkage
  modified_base 3: mod_base = OTHER; note = 2'-O-methoxyethyl modified nucleotide with phosphorothioate linkage
  modified_base 4: mod_base = OTHER; note = 2'-O-methoxyethyl modified nucleotide with phosphorothioate linkage
  modified_base 5: mod_base = OTHER; note = 2'-O-methoxyethyl modified nucleotide with phosphorothioate linkage
  modified_base 6: mod_base = OTHER; note = Nucleotide with phosphorothioate linkage
  modified_base 7: mod_base = OTHER; note = Thymine with phosphorothioate linkage
  modified_base 8: mod_base = OTHER; note = Nucleotide with phosphorothioate linkage
  modified_base 9: mod_base = OTHER; note = Nucleotide with phosphorothioate linkage
  modified_base 10: mod_base = OTHER; note = Nucleotide with phosphorothioate linkage
  modified_base 11: mod_base = OTHER; note = Nucleotide with phosphorothioate linkage
  modified_base 12: mod_base = OTHER; note = Nucleotide with phosphorothioate linkage
  modified_base 13: mod_base = OTHER; note = Nucleotide with phosphorothioate linkage
  modified_base 14: mod_base = OTHER; note = Nucleotide with phosphorothioate linkage
  modified_base 15: mod_base = OTHER; note = Nucleotide with phosphorothioate linkage
  modified_base 16: mod_base = OTHER; note = 2'-O-methoxyethyl modified nucleotide with phosphorothioate linkage
  modified_base 17: mod_base = OTHER; note = 2'-O-methoxyethyl modified thymine with phosphorothioate linkage
  modified_base 18: mod_base = OTHER; note = Locked nucleic acid with phosphorothioate linkage
  modified_base 19: mod_base = OTHER; note = 2'-O-methoxyethyl modified nucleotide with phosphorothioate linkage
  modified_base 20: mod_base = OTHER; note = 2'-O-methoxyethyl modified nucleotide
  misc_feature 1..5: note = RNA
  misc_feature 6..15: note = DNA
  misc_feature 16..20: note = RNA
cagaggtgaagcgaagtgca

SEQ ID NO: 173 - DNA, 20 bp, synthetic construct
  source 1..20: mol_type = other DNA
  modified_base 1: mod_base = OTHER; note = 2'-O-methoxyethyl modified nucleotide with phosphorothioate linkage
  modified_base 2: mod_base = OTHER; note = 2'-O-methoxyethyl modified nucleotide with phosphorothioate linkage
  modified_base 3: mod_base = OTHER; note = 2'-O-methoxyethyl modified nucleotide with phosphorothioate linkage
  modified_base 4: mod_base = OTHER; note = 2'-O-methoxyethyl modified nucleotide with phosphorothioate linkage
  modified_base 5: mod_base = OTHER; note = 2'-O-methoxyethyl modified nucleotide with phosphorothioate linkage
  modified_base 6: mod_base = OTHER; note = Nucleotide with phosphorothioate linkage
  modified_base 7: mod_base = OTHER; note = Thymine with phosphorothioate linkage
  modified_base 8: mod_base = OTHER; note = Nucleotide with phosphorothioate linkage
  modified_base 9: mod_base = OTHER; note = Nucleotide with phosphorothioate linkage
  modified_base 10: mod_base = OTHER; note = Nucleotide with phosphorothioate linkage
  modified_base 11: mod_base = OTHER; note = Nucleotide with phosphorothioate linkage
  modified_base 12: mod_base = OTHER; note = Nucleotide with phosphorothioate linkage
  modified_base 13: mod_base = OTHER; note = Nucleotide with phosphorothioate linkage
  modified_base 14: mod_base = OTHER; note = Nucleotide with phosphorothioate linkage
  modified_base 15: mod_base = OTHER; note = Nucleotide with phosphorothioate linkage
  modified_base 16: mod_base = OTHER; note = 2'-O-methoxyethyl modified nucleotide with phosphorothioate linkage
  modified_base 17: mod_base = OTHER; note = 2'-O-methoxyethyl modified thymine with phosphorothioate linkage
  modified_base 18: mod_base = OTHER; note = 2'-O-methoxyethyl modified nucleotide with phosphorothioate linkage
  modified_base 19: mod_base = OTHER; note = Locked nucleic acid with phosphorothioate linkage
  modified_base 20: mod_base = OTHER; note = 2'-O-methoxyethyl modified nucleotide
  misc_feature 1..5: note = RNA
  misc_feature 6..15: note = DNA
  misc_feature 16..20: note = RNA
cagaggtgaagcgaagtgca

SEQ ID NO: 174 - DNA, 20 bp, synthetic construct
  source 1..20: mol_type = other DNA
  modified_base 1: mod_base = OTHER; note = 2'-O-methoxyethyl modified nucleotide with phosphorothioate linkage
  modified_base 2: mod_base = OTHER; note = 2'-O-methoxyethyl modified nucleotide with phosphorothioate linkage
  modified_base 3: mod_base = OTHER; note = 2'-O-methoxyethyl modified nucleotide with phosphorothioate linkage
  modified_base 4: mod_base = OTHER; note = 2'-O-methoxyethyl modified nucleotide with phosphorothioate linkage
  modified_base 5: mod_base = OTHER; note = 2'-O-methoxyethyl modified nucleotide with phosphorothioate linkage
  modified_base 6: mod_base = OTHER; note = Nucleotide with phosphorothioate linkage
  modified_base 7: mod_base = OTHER; note = Thymine with phosphorothioate linkage
  modified_base 8: mod_base = OTHER; note = Nucleotide with phosphorothioate linkage
  modified_base 9: mod_base = OTHER; note = Nucleotide with phosphorothioate linkage
  modified_base 10: mod_base = OTHER; note = Nucleotide with phosphorothioate linkage
  modified_base 11: mod_base = OTHER; note = Nucleotide with phosphorothioate linkage
  modified_base 12: mod_base = OTHER; note = Nucleotide with phosphorothioate linkage
  modified_base 13: mod_base = OTHER; note = Nucleotide with phosphorothioate linkage
  modified_base 14: mod_base = OTHER; note = Nucleotide with phosphorothioate linkage
  modified_base 15: mod_base = OTHER; note = Nucleotide with phosphorothioate linkage
  modified_base 16: mod_base = OTHER; note = 2'-O-methoxyethyl modified nucleotide with phosphorothioate linkage
  modified_base 17: mod_base = OTHER; note = 2'-O-methoxyethyl modified thymine with phosphorothioate linkage
  modified_base 18: mod_base = OTHER; note = 2'-O-methoxyethyl modified nucleotide with phosphorothioate linkage
  modified_base 19: mod_base = OTHER; note = 2'-O-methoxyethyl modified nucleotide with phosphorothioate linkage
  modified_base 20: mod_base = OTHER; note = Locked nucleic acid
  misc_feature 1..5: note = RNA
  misc_feature 6..15: note = DNA
  misc_feature 16..20: note = RNA
cagaggtgaagcgaagtgca

SEQ ID NO: 175 - DNA, 20 bp, synthetic construct
  source 1..20: mol_type = other DNA
  modified_base 1: mod_base = OTHER; note = Locked 5-methylcytosine with phosphorothioate linkage
  modified_base 2: mod_base = OTHER; note = 2'-O-methoxyethyl modified nucleotide with phosphorothioate linkage
  modified_base 3: mod_base = OTHER; note = 2'-O-methoxyethyl modified nucleotide with phosphorothioate linkage
  modified_base 4: mod_base = OTHER; note = 2'-O-methoxyethyl modified nucleotide with phosphorothioate linkage
  modified_base 5: mod_base = OTHER; note = 2'-O-methoxyethyl modified nucleotide with phosphorothioate linkage
  modified_base 6: mod_base = OTHER; note = Nucleotide with phosphorothioate linkage
  modified_base 7: mod_base = OTHER; note = Thymine with phosphorothioate linkage
  modified_base 8: mod_base = OTHER; note = Nucleotide with phosphorothioate linkage
  modified_base 9: mod_base = OTHER; note = Nucleotide with phosphorothioate linkage
  modified_base 10: mod_base = OTHER; note = Nucleotide with phosphorothioate linkage
  modified_base 11: mod_base = OTHER; note = Nucleotide with phosphorothioate linkage
  modified_base 12: mod_base = OTHER; note = 5-methylcytosine with phosphorothioate linkage
  modified_base 13: mod_base = OTHER; note = Nucleotide with phosphorothioate linkage
  modified_base 14: mod_base = OTHER; note = Nucleotide with phosphorothioate linkage
  modified_base 15: mod_base = OTHER; note = Nucleotide with phosphorothioate linkage
  modified_base 16: mod_base = OTHER; note = 2'-O-methoxyethyl modified nucleotide with phosphorothioate linkage
  modified_base 17: mod_base = OTHER; note = Locked thymine with phosphorothioate linkage
  modified_base 18: mod_base = OTHER; note = 2'-O-methoxyethyl modified nucleotide with phosphorothioate linkage
  modified_base 19: mod_base = OTHER; note = 2'-O-methoxyethyl 5-methylcytosine with phosphorothioate linkage
  modified_base 20: mod_base = OTHER; note = 2'-O-methoxyethyl modified nucleotide
  misc_feature 1..5: note = RNA
  misc_feature 6..15: note = DNA
  misc_feature 16..20: note = RNA
cagaggtgaagcgaagtgca

SEQ ID NO: 176 - DNA, 20 bp, synthetic construct
  source 1..20: mol_type = other DNA
  modified_base 1: mod_base = OTHER; note = Locked 5-methylcytosine with phosphorothioate linkage
  modified_base 2: mod_base = OTHER; note = 2'-O-methoxyethyl modified nucleotide with phosphorothioate linkage
  modified_base 3: mod_base = OTHER; note = 2'-O-methoxyethyl modified nucleotide with phosphorothioate linkage
  modified_base 4: mod_base = OTHER; note = 2'-O-methoxyethyl modified nucleotide with phosphorothioate linkage
  modified_base 5: mod_base = OTHER; note = 2'-O-methoxyethyl modified nucleotide with phosphorothioate linkage
  modified_base 6: mod_base = OTHER; note = Nucleotide with phosphorothioate linkage
  modified_base 7: mod_base = OTHER; note = Thymine with phosphorothioate linkage
  modified_base 8: mod_base = OTHER; note = Nucleotide with phosphorothioate linkage
  modified_base 9: mod_base = OTHER; note = Nucleotide with phosphorothioate linkage
  modified_base 10: mod_base = OTHER; note = Nucleotide with phosphorothioate linkage
  modified_base 11: mod_base = OTHER; note = Nucleotide with phosphorothioate linkage
  modified_base 12: mod_base = OTHER; note = 5-methylcytosine with phosphorothioate linkage
  modified_base 13: mod_base = OTHER; note = Nucleotide with phosphorothioate linkage
  modified_base 14: mod_base = OTHER; note = Nucleotide with phosphorothioate linkage
  modified_base 15: mod_base = OTHER; note = Nucleotide with phosphorothioate linkage
  modified_base 16: mod_base = OTHER; note = 2'-O-methoxyethyl modified nucleotide with phosphorothioate linkage
  modified_base 17: mod_base = OTHER; note = 2'-O-methoxyethyl modified thymine with phosphorothioate linkage
  modified_base 18: mod_base = OTHER; note = 2'-O-methoxyethyl modified nucleotide with phosphorothioate linkage
  modified_base 19: mod_base = OTHER; note = Locked 5-methylcytosine with phosphorothioate linkage
  modified_base 20: mod_base = OTHER; note = 2'-O-methoxyethyl modified nucleotide
  misc_feature 1..5: note = RNA
  misc_feature 6..15: note = DNA
  misc_feature 16..20: note = RNA
cagaggtgaagcgaagtgca

SEQ ID NO: 177 - DNA, 20 bp, synthetic construct
  source 1..20: mol_type = other DNA
  modified_base 1: mod_base = OTHER; note = 2'-O-methoxyethyl 5-methylcytosine with phosphorothioate linkage
  modified_base 2: mod_base = OTHER; note = Locked nucleic acid with phosphorothioate linkage
  modified_base 3: mod_base = OTHER; note = 2'-O-methoxyethyl modified nucleotide with phosphorothioate linkage
  modified_base 4: mod_base = OTHER; note = Locked nucleic acid with phosphorothioate linkage
  modified_base 5: mod_base = OTHER; note = 2'-O-methoxyethyl modified nucleotide with phosphorothioate linkage
  modified_base 6: mod_base = OTHER; note = Nucleotide with phosphorothioate linkage
  modified_base 7: mod_base = OTHER; note = Thymine with phosphorothioate linkage
  modified_base 8: mod_base = OTHER; note = Nucleotide with phosphorothioate linkage
  modified_base 9: mod_base = OTHER; note = Nucleotide with phosphorothioate linkage
  modified_base 10: mod_base = OTHER; note = Nucleotide with phosphorothioate linkage
  modified_base 11: mod_base = OTHER; note = Nucleotide with phosphorothioate linkage
  modified_base 12: mod_base = OTHER; note = 5-methylcytosine with phosphorothioate linkage
  modified_base 13: mod_base = OTHER; note = Nucleotide with phosphorothioate linkage
  modified_base 14: mod_base = OTHER; note = Nucleotide with phosphorothioate linkage
  modified_base 15: mod_base = OTHER; note = Nucleotide with phosphorothioate linkage
  modified_base 16: mod_base = OTHER; note = 2'-O-methoxyethyl modified nucleotide with phosphorothioate linkage
  modified_base 17: mod_base = OTHER; note = 2'-O-methoxyethyl modified thymine with phosphorothioate linkage
  modified_base 18: mod_base = OTHER; note = 2'-O-methoxyethyl modified nucleotide with phosphorothioate linkage
  modified_base 19: mod_base = OTHER; note = 2'-O-methoxyethyl 5-methylcytosine with phosphorothioate linkage
  modified_base 20: mod_base = OTHER; note = 2'-O-methoxyethyl modified nucleotide
  misc_feature 1..5: note = RNA
  misc_feature 6..15: note = DNA
  misc_feature 16..20: note = RNA
cagaggtgaagcgaagtgca

SEQ ID NO: 178 - DNA, 20 bp, synthetic construct
  source 1..20: mol_type = other DNA
  modified_base 1: mod_base = OTHER; note = 2'-O-methoxyethyl 5-methylcytosine with phosphorothioate linkage
  modified_base 2: mod_base = OTHER; note = Locked nucleic acid with phosphorothioate linkage
  modified_base 3: mod_base = OTHER; note = 2'-O-methoxyethyl modified nucleotide with phosphorothioate linkage
  modified_base 4: mod_base = OTHER; note = 2'-O-methoxyethyl modified nucleotide with phosphorothioate linkage
  modified_base 5: mod_base = OTHER; note = 2'-O-methoxyethyl modified nucleotide with phosphorothioate linkage
  modified_base 6: mod_base = OTHER; note = Nucleotide with phosphorothioate linkage
  modified_base 7: mod_base = OTHER; note = Thymine with phosphorothioate linkage
  modified_base 8: mod_base = OTHER; note = Nucleotide with phosphorothioate linkage
  modified_base 9: mod_base = OTHER; note = Nucleotide with phosphorothioate linkage
  modified_base 10: mod_base = OTHER; note = Nucleotide with phosphorothioate linkage
  modified_base 11: mod_base = OTHER; note = Nucleotide with phosphorothioate linkage
  modified_base 12: mod_base = OTHER; note = 5-methylcytosine with phosphorothioate linkage
  modified_base 13: mod_base = OTHER; note = Nucleotide with phosphorothioate linkage
  modified_base 14: mod_base = OTHER; note = Nucleotide with phosphorothioate linkage
  modified_base 15: mod_base = OTHER; note = Nucleotide with phosphorothioate linkage
  modified_base 16: mod_base = OTHER; note = 2'-O-methoxyethyl modified nucleotide with phosphorothioate linkage
  modified_base 17: mod_base = OTHER; note = 2'-O-methoxyethyl modified thymine with phosphorothioate linkage
  modified_base 18: mod_base = OTHER; note = 2'-O-methoxyethyl modified nucleotide with phosphorothioate linkage
  modified_base 19: mod_base = OTHER; note = 2'-O-methoxyethyl 5-methylcytosine with phosphorothioate linkage
  modified_base 20: mod_base = OTHER; note = Locked nucleic acid
  misc_feature 1..5: note = RNA
  misc_feature 6..15: note = DNA
  misc_feature 16..20: note = RNA
cagaggtgaagcgaagtgca

SEQ ID NO: 179 - DNA, 20 bp, synthetic construct
  source 1..20: mol_type = other DNA
  modified_base 1: mod_base = OTHER; note = 2'-O-methoxyethyl 5-methylcytosine with phosphorothioate linkage
  modified_base 2: mod_base = OTHER; note = 2'-O-methoxyethyl modified nucleotide with phosphorothioate linkage
  modified_base 3: mod_base = OTHER; note = 2'-O-methoxyethyl modified nucleotide with phosphorothioate linkage
  modified_base 4: mod_base = OTHER; note = Locked nucleic acid with phosphorothioate linkage
  modified_base 5: mod_base = OTHER; note = 2'-O-methoxyethyl modified nucleotide with phosphorothioate linkage
  modified_base 6: mod_base = OTHER; note = Nucleotide with phosphorothioate linkage
  modified_base 7: mod_base = OTHER; note = Thymine with phosphorothioate linkage
  modified_base 8: mod_base = OTHER; note = Nucleotide with phosphorothioate linkage
  modified_base 9: mod_base = OTHER; note = Nucleotide with phosphorothioate linkage
  modified_base 10: mod_base = OTHER; note = Nucleotide with phosphorothioate linkage
  modified_base 11: mod_base = OTHER; note = Nucleotide with phosphorothioate linkage
  modified_base 12: mod_base = OTHER; note = 5-methylcytosine with phosphorothioate linkage
  modified_base 13: mod_base = OTHER; note = Nucleotide with phosphorothioate linkage
  modified_base 14: mod_base = OTHER; note = Nucleotide with phosphorothioate linkage
  modified_base 15: mod_base = OTHER; note = Nucleotide with phosphorothioate linkage
  modified_base 16: mod_base = OTHER; note = 2'-O-methoxyethyl modified nucleotide with phosphorothioate linkage
  modified_base 17: mod_base = OTHER; note = 2'-O-methoxyethyl modified thymine with phosphorothioate linkage
  modified_base 18: mod_base = OTHER; note = 2'-O-methoxyethyl modified nucleotide with phosphorothioate linkage
  modified_base 19: mod_base = OTHER; note = 2'-O-methoxyethyl 5-methylcytosine with phosphorothioate linkage
  modified_base 20: mod_base = OTHER; note = Locked nucleic acid
  misc_feature 1..5: note = RNA
  misc_feature 6..15: note = DNA
  misc_feature 16..20: note = RNA
cagaggtgaagcgaagtgca

SEQ ID NO: 180 - DNA, 20 bp, synthetic construct
  source 1..20: mol_type = other DNA
  modified_base 1: mod_base = OTHER; note = 2'-O-methoxyethyl 5-methylcytosine with phosphorothioate linkage
  modified_base 2: mod_base = OTHER; note = 2'-O-methoxyethyl modified nucleotide with phosphorothioate linkage
  modified_base 3: mod_base = OTHER; note = Locked nucleic acid with phosphorothioate linkage
  modified_base 4: mod_base = OTHER; note = 2'-O-methoxyethyl modified nucleotide with phosphorothioate linkage
  modified_base 5: mod_base = OTHER; note = Locked nucleic acid with phosphorothioate linkage
  modified_base 6: mod_base = OTHER; note = Nucleotide with phosphorothioate linkage
  modified_base 7: mod_base = OTHER; note = Thymine with phosphorothioate linkage
  modified_base 8: mod_base = OTHER; note = Nucleotide with phosphorothioate linkage
  modified_base 9: mod_base = OTHER; note = Nucleotide with phosphorothioate linkage
  modified_base 10: mod_base = OTHER; note = Nucleotide with phosphorothioate linkage
  modified_base 11: mod_base = OTHER; note = Nucleotide with phosphorothioate linkage
  modified_base 12: mod_base = OTHER; note = 5-methylcytosine with phosphorothioate linkage
  modified_base 13: mod_base = OTHER; note = Nucleotide with phosphorothioate linkage
  modified_base 14: mod_base = OTHER; note = Nucleotide with phosphorothioate linkage
  modified_base 15: mod_base = OTHER; note = Nucleotide with phosphorothioate linkage
  modified_base 16: mod_base = OTHER; note = 2'-O-methoxyethyl modified nucleotide with phosphorothioate linkage
  modified_base 17: mod_base = OTHER; note = 2'-O-methoxyethyl modified thymine with phosphorothioate linkage
  modified_base 18: mod_base = OTHER; note = 2'-O-methoxyethyl modified nucleotide with phosphorothioate linkage
  modified_base 19: mod_base = OTHER; note = 2'-O-methoxyethyl 5-methylcytosine with phosphorothioate linkage
  modified_base 20: mod_base = OTHER; note = 2'-O-methoxyethyl modified nucleotide
  misc_feature 1..5: note = RNA
  misc_feature 6..15: note = DNA
  misc_feature 16..20: note = RNA
cagaggtgaagcgaagtgca

SEQ ID NO: 181 - DNA, 20 bp, synthetic construct
  source 1..20: mol_type = other DNA
  modified_base 1: mod_base = OTHER; note = 2'-O-methoxyethyl 5-methylcytosine with phosphorothioate linkage
  modified_base 2: mod_base = OTHER; note = 2'-O-methoxyethyl modified nucleotide with phosphorothioate linkage
  modified_base 3: mod_base = OTHER; note = 2'-O-methoxyethyl modified nucleotide with phosphorothioate linkage
  modified_base 4: mod_base = OTHER; note = 2'-O-methoxyethyl modified nucleotide with phosphorothioate linkage
  modified_base 5: mod_base = OTHER; note = 2'-O-methoxyethyl modified nucleotide with phosphorothioate linkage
  modified_base 6: mod_base = OTHER; note = Nucleotide with phosphorothioate linkage
  modified_base 7: mod_base = OTHER; note = Thymine with phosphorothioate linkage
  modified_base 8: mod_base = OTHER; note = Nucleotide with phosphorothioate linkage
  modified_base 9: mod_base = OTHER; note = Nucleotide with phosphorothioate linkage
  modified_base 10: mod_base = OTHER; note = Nucleotide with phosphorothioate linkage
  modified_base 11: mod_base = OTHER; note = Nucleotide with phosphorothioate linkage
  modified_base 12: mod_base = OTHER; note = 5-methylcytosine with phosphorothioate linkage
  modified_base 13: mod_base = OTHER; note = Nucleotide with phosphorothioate linkage
  modified_base 14: mod_base = OTHER; note = Nucleotide with phosphorothioate linkage
  modified_base 15: mod_base = OTHER; note = Nucleotide with phosphorothioate linkage
  modified_base 16: mod_base = OTHER; note = Locked nucleic acid with phosphorothioate linkage
  modified_base 17: mod_base = OTHER; note = 2'-O-methoxyethyl modified thymine with phosphorothioate linkage
  modified_base 18: mod_base = OTHER; note = Locked nucleic acid with phosphorothioate linkage
  modified_base 19: mod_base = OTHER; note = 2'-O-methoxyethyl 5-methylcytosine with phosphorothioate linkage
  modified_base 20: mod_base = OTHER; note = 2'-O-methoxyethyl modified nucleotide
  misc_feature 1..5: note = RNA
  misc_feature 6..15: note = DNA
  misc_feature 16..20: note = RNA
cagaggtgaagcgaagtgca

SEQ ID NO: 182 - DNA, 20 bp, synthetic construct
  source 1..20: mol_type = other DNA
  modified_base 1: mod_base = OTHER; note = 2'-O-methoxyethyl 5-methylcytosine with phosphorothioate linkage
  modified_base 2: mod_base = OTHER; note = 2'-O-methoxyethyl modified nucleotide with phosphorothioate linkage
  modified_base 3: mod_base = OTHER; note = Locked nucleic acid with phosphorothioate linkage
  modified_base 4: mod_base = OTHER; note = 2'-O-methoxyethyl modified nucleotide with phosphorothioate linkage
  modified_base 5: mod_base = OTHER; note = 2'-O-methoxyethyl modified nucleotide with phosphorothioate linkage
  modified_base 6: mod_base = OTHER; note = Nucleotide with phosphorothioate linkage
  modified_base 7: mod_base = OTHER; note = Thymine with phosphorothioate linkage
  modified_base 8: mod_base = OTHER; note = Nucleotide with phosphorothioate linkage
  modified_base 9: mod_base = OTHER; note = Nucleotide with phosphorothioate linkage
  modified_base 10: mod_base = OTHER; note = Nucleotide with phosphorothioate linkage
  modified_base 11: mod_base = OTHER; note = Nucleotide with phosphorothioate linkage
  modified_base 12: mod_base = OTHER; note = 5-methylcytosine with phosphorothioate linkage
  modified_base 13: mod_base = OTHER; note = Nucleotide with phosphorothioate linkage
  modified_base 14: mod_base = OTHER; note = Nucleotide with phosphorothioate linkage
  modified_base 15: mod_base = OTHER; note = Nucleotide with phosphorothioate linkage
  modified_base 16: mod_base = OTHER; note = Locked nucleic acid with phosphorothioate linkage
  modified_base 17: mod_base = OTHER; note = 2'-O-methoxyethyl modified thymine with phosphorothioate linkage
  modified_base 18: mod_base = OTHER; note = 2'-O-methoxyethyl modified nucleotide with phosphorothioate linkage
  modified_base 19: mod_base = OTHER; note = 2'-O-methoxyethyl 5-methylcytosine with phosphorothioate linkage
  modified_base 20: mod_base = OTHER; note = 2'-O-methoxyethyl modified nucleotide
  misc_feature 1..5: note = RNA
  misc_feature 6..15: note = DNA
  misc_feature 16..20: note = RNA
cagaggtgaagcgaagtgca

SEQ ID NO: 183 - DNA, 20 bp, synthetic construct
  source 1..20: mol_type = other DNA
  modified_base 1: mod_base = OTHER; note = 2'-O-methoxyethyl 5-methylcytosine with phosphorothioate linkage
  modified_base 2: mod_base = OTHER; note = 2'-O-methoxyethyl modified nucleotide with phosphorothioate linkage
  modified_base 3: mod_base = OTHER; note = Locked nucleic acid with phosphorothioate linkage
  modified_base 4: mod_base = OTHER; note = 2'-O-methoxyethyl modified nucleotide with phosphorothioate linkage
  modified_base 5: mod_base = OTHER; note = 2'-O-methoxyethyl modified nucleotide with phosphorothioate linkage
  modified_base 6: mod_base = OTHER; note = Nucleotide with phosphorothioate linkage
  modified_base 7: mod_base = OTHER; note = Thymine with phosphorothioate linkage
  modified_base 8: mod_base = OTHER; note = Nucleotide with phosphorothioate linkage
  modified_base 9: mod_base = OTHER; note = Nucleotide with phosphorothioate linkage
  modified_base 10: mod_base = OTHER; note = Nucleotide with phosphorothioate linkage
  modified_base 11: mod_base = OTHER; note = Nucleotide with phosphorothioate linkage
  modified_base 12: mod_base = OTHER; note = 5-methylcytosine with phosphorothioate linkage
  modified_base 13: mod_base = OTHER; note = Nucleotide with phosphorothioate linkage
  modified_base 14: mod_base = OTHER; note = Nucleotide with phosphorothioate linkage
  modified_base 15: mod_base = OTHER; note = Nucleotide with phosphorothioate linkage
  modified_base 16: mod_base = OTHER; note = 2'-O-methoxyethyl modified nucleotide with phosphorothioate linkage
  modified_base 17: mod_base = OTHER; note = 2'-O-methoxyethyl modified thymine with phosphorothioate linkage
  modified_base 18: mod_base = OTHER; note = Locked nucleic acid with phosphorothioate linkage
  modified_base 19: mod_base = OTHER; note = 2'-O-methoxyethyl 5-methylcytosine with phosphorothioate linkage
  modified_base 20: mod_base = OTHER; note = 2'-O-methoxyethyl modified nucleotide
  misc_feature 1..5: note = RNA
  misc_feature 6..15: note = DNA
  misc_feature 16..20: note = RNA
cagaggtgaagcgaagtgca

SEQ ID NO: 184 - DNA, 20 bp, synthetic construct
  source 1..20: mol_type = other DNA
  modified_base 1: mod_base = OTHER; note = 2'-O-methoxyethyl 5-methylcytosine with phosphorothioate linkage
  modified_base 2: mod_base = OTHER; note = 2'-O-methoxyethyl modified nucleotide with phosphorothioate linkage
  modified_base 3: mod_base = OTHER; note = 2'-O-methoxyethyl modified nucleotide with phosphorothioate linkage
  modified_base 4: mod_base = OTHER; note = 2'-O-methoxyethyl modified nucleotide with phosphorothioate linkage
  modified_base 5: mod_base = OTHER; note = Locked nucleic acid with phosphorothioate linkage
  modified_base 6: mod_base = OTHER; note = Nucleotide with phosphorothioate linkage
  modified_base 7: mod_base = OTHER; note = Thymine with phosphorothioate linkage
  modified_base 8: mod_base = OTHER; note = Nucleotide with phosphorothioate linkage
  modified_base 9: mod_base = OTHER; note = Nucleotide with phosphorothioate linkage
  modified_base 10: mod_base = OTHER; note = Nucleotide with phosphorothioate linkage
  modified_base 11: mod_base = OTHER; note = Nucleotide with phosphorothioate linkage
  modified_base 12: mod_base = OTHER; note = 5-methylcytosine with phosphorothioate linkage
  modified_base 13: mod_base = OTHER; note = Nucleotide with phosphorothioate linkage
  modified_base 14: mod_base = OTHER; note = Nucleotide with phosphorothioate linkage
  modified_base 15: mod_base = OTHER; note = Nucleotide with phosphorothioate linkage
  modified_base 16: mod_base = OTHER; note = 2'-O-methoxyethyl modified nucleotide with phosphorothioate linkage
  modified_base 17: mod_base = OTHER; note = 2'-O-methoxyethyl modified thymine with phosphorothioate linkage
  modified_base 18: mod_base = OTHER; note = Locked nucleic acid with phosphorothioate linkage
  modified_base 19: mod_base = OTHER; note = 2'-O-methoxyethyl 5-methylcytosine with phosphorothioate linkage
  modified_base 20: mod_base = OTHER; note = 2'-O-methoxyethyl modified nucleotide
  misc_feature 1..5: note = RNA
  misc_feature 6..15: note = DNA
  misc_feature 16..20: note = RNA
cagaggtgaagcgaagtgca

SEQ ID NO: 185 - DNA, 20 bp, synthetic construct
  source 1..20: mol_type = other DNA
  modified_base 1: mod_base = OTHER; note = 2'-O-methoxyethyl 5-methylcytosine with phosphorothioate linkage
  modified_base 2: mod_base = OTHER; note = 2'-O-methoxyethyl modified nucleotide with phosphorothioate linkage
  modified_base 3: mod_base = OTHER; note = 2'-O-methoxyethyl modified nucleotide with phosphorothioate linkage
  modified_base 4: mod_base = OTHER; note = 2'-O-methoxyethyl modified nucleotide with phosphorothioate linkage
  modified_base 5: mod_base = OTHER; note = Locked nucleic acid with phosphorothioate linkage
  modified_base 6: mod_base = OTHER; note = Nucleotide with phosphorothioate linkage
  modified_base 7: mod_base = OTHER; note = Thymine with phosphorothioate linkage
  modified_base 8: mod_base = OTHER; note = Nucleotide with phosphorothioate linkage
  modified_base 9: mod_base = OTHER; note = Nucleotide with phosphorothioate linkage
  modified_base 10: mod_base = OTHER; note = Nucleotide with phosphorothioate linkage
  modified_base 11: mod_base = OTHER; note = Nucleotide with phosphorothioate linkage
  modified_base 12: mod_base = OTHER; note = 5-methylcytosine with phosphorothioate linkage
  modified_base 13: mod_base = OTHER; note = Nucleotide with phosphorothioate linkage
  modified_base 14: mod_base = OTHER; note = Nucleotide with phosphorothioate linkage
  modified_base 15: mod_base = OTHER; note = Nucleotide with phosphorothioate linkage
  modified_base 16: mod_base = OTHER; note = Locked nucleic acid with phosphorothioate linkage
  modified_base 17: mod_base = OTHER; note = 2'-O-methoxyethyl modified thymine with phosphorothioate linkage
  modified_base 18: mod_base = OTHER; note = 2'-O-methoxyethyl modified nucleotide with phosphorothioate linkage
  modified_base 19: mod_base = OTHER; note = 2'-O-methoxyethyl 5-methylcytosine with phosphorothioate linkage
  modified_base 20: mod_base = OTHER; note = 2'-O-methoxyethyl modified nucleotide
  misc_feature 1..5: note = RNA
  misc_feature 6..15: note = DNA
  misc_feature 16..20: note = RNA
cagaggtgaagcgaagtgca

SEQ ID NO: 186 - DNA, 20 bp, synthetic construct
  source 1..20: mol_type = other DNA
  modified_base 1: mod_base = OTHER; note = 2'-O-methoxyethyl 5-methylcytosine with phosphorothioate linkage
  modified_base 2: mod_base = OTHER; note = 2'-O-methoxyethyl modified nucleotide with phosphorothioate linkage
  modified_base 3: mod_base = OTHER; note = 2'-O-methoxyethyl modified nucleotide with phosphorothioate linkage
  modified_base 4: mod_base = OTHER; note = 2'-O-methyl modified nucleotide with phosphorothioate linkage
  modified_base 5: mod_base = OTHER; note = 2'-O-methoxyethyl modified nucleotide with phosphorothioate linkage
  modified_base 6: mod_base = OTHER; note = Nucleotide with phosphorothioate linkage
  modified_base 7: mod_base = OTHER; note = Thymine with phosphorothioate linkage
  modified_base 8: mod_base = OTHER; note = Nucleotide with phosphorothioate linkage
  modified_base 9: mod_base = OTHER; note = Nucleotide with phosphorothioate linkage
  modified_base 10: mod_base = OTHER; note = Nucleotide with phosphorothioate linkage
  modified_base 11: mod_base = OTHER; note = 8-amino-guanosine with phosphorothioate linkage
  modified_base 12: mod_base = OTHER; note = 5-methylcytosine with phosphorothioate linkage
  modified_base 13: mod_base = OTHER; note = Nucleotide with phosphorothioate linkage
  modified_base 14: mod_base = OTHER; note = Nucleotide with phosphorothioate linkage
  modified_base 15: mod_base = OTHER; note = Nucleotide with phosphorothioate linkage
  modified_base 16: mod_base = OTHER; note = 2'-O-methoxyethyl modified nucleotide with phosphorothioate linkage
  modified_base 17: mod_base = OTHER; note = 2'-O-methoxyethyl modified thymine with phosphorothioate linkage
  modified_base 18: mod_base = OTHER; note = 2'-O-methoxyethyl modified nucleotide with phosphorothioate linkage
  modified_base 19: mod_base = OTHER; note = 2'-O-methoxyethyl 5-methylcytosine with phosphorothioate linkage
  modified_base 20: mod_base = OTHER; note = 2'-O-methoxyethyl modified nucleotide
  misc_feature 1..5: note = RNA
  misc_feature 6..15: note = DNA
  misc_feature 16..20: note = RNA
cagaggtgaagcgaagtgca

SEQ ID NO: 187 - DNA, 20 bp, synthetic construct
  source 1..20: mol_type = other DNA
  modified_base 1: mod_base = OTHER; note = 2'-O-methoxyethyl 5-methylcytosine with phosphorothioate linkage
  modified_base 2: mod_base = OTHER; note = 2'-O-methoxyethyl modified nucleotide with phosphorothioate linkage
  modified_base 3: mod_base = OTHER; note = 2'-O-methoxyethyl modified nucleotide with phosphorothioate linkage
  modified_base 4: mod_base = OTHER; note = 2'-O-methoxyethyl modified nucleotide with phosphorothioate linkage
  modified_base 5: mod_base = OTHER; note = 2'-O-methoxyethyl modified nucleotide with phosphorothioate linkage
  modified_base 6: mod_base = OTHER; note = 2'-O-methyl modified nucleotide with phosphorothioate linkage
  modified_base 7: mod_base = OTHER; note = Thymine with phosphorothioate linkage
  modified_base 8: mod_base = OTHER; note = Nucleotide with phosphorothioate linkage
  modified_base 9: mod_base = OTHER; note = Nucleotide with phosphorothioate linkage
  modified_base 10: mod_base = OTHER; note = Nucleotide with phosphorothioate linkage
  modified_base 11: mod_base = OTHER; note = 8-amino-guanosine with phosphorothioate linkage
  modified_base 12: mod_base = OTHER; note = 5-methylcytosine with phosphorothioate linkage
  modified_base 13: mod_base = OTHER; note = Nucleotide with phosphorothioate linkage
  modified_base 14: mod_base = OTHER; note = Nucleotide with phosphorothioate linkage
  modified_base 15: mod_base = OTHER; note = Nucleotide with phosphorothioate linkage
  modified_base 16: mod_base = OTHER; note = 2'-O-methoxyethyl modified nucleotide with phosphorothioate linkage
  modified_base 17: mod_base = OTHER; note = 2'-O-methoxyethyl modified thymine with phosphorothioate linkage
  modified_base 18: mod_base = OTHER; note = 2'-O-methoxyethyl modified nucleotide with phosphorothioate linkage
  modified_base 19: mod_base = OTHER; note = 2'-O-methoxyethyl 5-methylcytosine with phosphorothioate linkage
  modified_base 20: mod_base = OTHER; note = 2'-O-methoxyethyl modified nucleotide
  misc_feature 1..6: note = RNA
  misc_feature 7..15: note = DNA
  misc_feature 16..20: note = RNA
cagaggtgaagcgaagtgca

SEQ ID NO: 188 - DNA, 20 bp, synthetic construct
  source 1..20: mol_type = other DNA
  modified_base 1: mod_base = OTHER; note = 2'-O-methoxyethyl 5-methylcytosine with phosphorothioate linkage
  modified_base 2: mod_base = OTHER; note = 2'-O-methoxyethyl modified nucleotide with phosphorothioate linkage
  modified_base 3: mod_base = OTHER; note = 2'-O-methoxyethyl modified nucleotide with phosphorothioate linkage
  modified_base 4: mod_base = OTHER; note = 2'-O-methyl modified nucleotide with phosphorothioate linkage
  modified_base 5: mod_base = OTHER; note = 2'-O-methyl modified nucleotide with phosphorothioate linkage
  modified_base 6: mod_base = OTHER; note = Nucleotide with phosphorothioate linkage
  modified_base 7: mod_base = OTHER; note = Thymine with phosphorothioate linkage
  modified_base 8: mod_base = OTHER; note = Nucleotide with phosphorothioate linkage
  modified_base 9: mod_base = OTHER; note = Nucleotide with phosphorothioate linkage
  modified_base 10: mod_base = OTHER; note = Nucleotide with phosphorothioate linkage
  modified_base 11: mod_base = OTHER; note = 8-amino-guanosine with phosphorothioate linkage
  modified_base 12: mod_base = OTHER; note = 5-methylcytosine with phosphorothioate linkage
  modified_base 13: mod_base = OTHER; note = Nucleotide with phosphorothioate linkage
  modified_base 14: mod_base = OTHER; note = Nucleotide with phosphorothioate linkage
  modified_base 15: mod_base = OTHER; note = Nucleotide with phosphorothioate linkage
  modified_base 16: mod_base = OTHER; note = 2'-O-methoxyethyl modified nucleotide with phosphorothioate linkage
  modified_base 17: mod_base = OTHER; note = 2'-O-methoxyethyl modified thymine with phosphorothioate linkage
  modified_base 18: mod_base = OTHER; note = 2'-O-methoxyethyl modified nucleotide with phosphorothioate linkage
  modified_base 19: mod_base = OTHER; note = 2'-O-methoxyethyl 5-methylcytosine with phosphorothioate linkage
  modified_base 20: mod_base = OTHER; note = 2'-O-methoxyethyl modified nucleotide
  misc_feature 1..5: note = RNA
  misc_feature 6..15: note = DNA
  misc_feature 16..20: note = RNA
cagaggtgaagcgaagtgca

SEQ ID NO: 189 - DNA, 20 bp, synthetic construct
  source 1..20: mol_type = other DNA
  modified_base 1: mod_base = OTHER; note = 2'-O-methoxyethyl 5-methylcytosine with phosphorothioate linkage
  modified_base 2: mod_base = OTHER; note = 2'-O-methoxyethyl modified nucleotide with phosphorothioate linkage
  modified_base 3: mod_base = OTHER; note = 2'-O-methoxyethyl modified nucleotide with phosphorothioate linkage
  modified_base 4: mod_base = OTHER; note = 2'-O-methyl modified nucleotide with phosphorothioate linkage
  modified_base 5: mod_base = OTHER; note = 2'-O-methyl modified nucleotide with phosphorothioate linkage
  modified_base 6: mod_base = OTHER; note = 2'-O-methyl modified nucleotide with phosphorothioate linkage
  modified_base 7: mod_base = OTHER; note = Thymine with phosphorothioate linkage
  modified_base 8: mod_base = OTHER; note = Nucleotide with phosphorothioate linkage
  modified_base 9: mod_base = OTHER; note = Nucleotide with phosphorothioate linkage
  modified_base 10: mod_base = OTHER; note = Nucleotide with phosphorothioate linkage
  modified_base 11: mod_base = OTHER; note = 8-amino-guanosine with phosphorothioate linkage
  modified_base 12: mod_base = OTHER; note = 5-methylcytosine with phosphorothioate linkage
  modified_base 13: mod_base = OTHER; note = Nucleotide with phosphorothioate linkage
  modified_base 14: mod_base = OTHER; note = Nucleotide with phosphorothioate linkage
  modified_base 15: mod_base = OTHER; note = Nucleotide with phosphorothioate linkage
  modified_base 16: mod_base = OTHER; note = 2'-O-methoxyethyl modified nucleotide with phosphorothioate linkage
  modified_base 17: mod_base = OTHER; note = 2'-O-methoxyethyl modified thymine with phosphorothioate linkage
  modified_base 18: mod_base = OTHER; note = 2'-O-methoxyethyl modified nucleotide with phosphorothioate linkage
  modified_base 19: mod_base = OTHER; note = 2'-O-methoxyethyl 5-methylcytosine with phosphorothioate linkage
  modified_base 20: mod_base = OTHER; note = 2'-O-methoxyethyl modified nucleotide
  misc_feature 1..6: note = RNA
  misc_feature 7..15: note = DNA
  misc_feature 16..20: note = RNA
cagaggtgaagcgaagtgca

SEQ ID NO: 190 - DNA, 20 bp, synthetic construct
  source 1..20: mol_type = other DNA
  modified_base 1: mod_base = OTHER; note = 2'-O-methoxyethyl 5-methylcytosine with phosphorothioate linkage
  modified_base 2: mod_base = OTHER; note = 2'-O-methoxyethyl modified nucleotide with phosphorothioate linkage
  modified_base 3: mod_base = OTHER; note = 2'-O-methyl modified nucleotide with phosphorothioate linkage
  modified_base 4: mod_base = OTHER; note = 2'-O-methoxyethyl modified nucleotide with phosphorothioate linkage
  modified_base 5: mod_base = OTHER; note = 2'-O-methyl modified nucleotide with phosphorothioate linkage
  modified_base 6: mod_base = OTHER; note = Nucleotide with phosphorothioate linkage
  modified_base 7: mod_base = OTHER; note = Thymine with phosphorothioate linkage
  modified_base 8: mod_base = OTHER; note = Nucleotide with phosphorothioate linkage
  modified_base 9: mod_base = OTHER; note = Nucleotide with phosphorothioate linkage
  modified_base 10: mod_base = OTHER; note = Nucleotide with phosphorothioate linkage
  modified_base 11: mod_base = OTHER; note = 8-amino-guanosine with phosphorothioate linkage
  modified_base 12: mod_base = OTHER; note = 5-methylcytosine with phosphorothioate linkage
  modified_base 13: mod_base = OTHER; note = Nucleotide with phosphorothioate linkage
  modified_base 14: mod_base = OTHER; note = Nucleotide with phosphorothioate linkage
  modified_base 15: mod_base = OTHER; note = Nucleotide with phosphorothioate linkage
  modified_base 16: mod_base = OTHER; note = 2'-O-methoxyethyl modified nucleotide with phosphorothioate linkage
  modified_base 17: mod_base = OTHER; note = 2'-O-methoxyethyl modified thymine with phosphorothioate linkage
  modified_base 18: mod_base = OTHER; note = 2'-O-methoxyethyl modified nucleotide with phosphorothioate linkage
  modified_base 19: mod_base = OTHER; note = 2'-O-methoxyethyl 5-methylcytosine with phosphorothioate linkage
  modified_base 20: mod_base = OTHER; note = 2'-O-methoxyethyl modified nucleotide
  misc_feature 1..5: note = RNA
  misc_feature 6..15: note = DNA
  misc_feature 16..20: note = RNA
cagaggtgaagcgaagtgca

SEQ ID NO: 191 - DNA, 20 bp, synthetic construct
  source 1..20: mol_type = other DNA
  modified_base 1: mod_base = OTHER; note = 2'-O-methoxyethyl 5-methylcytosine with phosphorothioate linkage
  modified_base 2: mod_base = OTHER; note = 2'-O-methoxyethyl modified nucleotide with phosphorothioate linkage
  modified_base 3: mod_base = OTHER; note = 2'-O-methoxyethyl modified nucleotide with phosphorothioate linkage
  modified_base 4: mod_base = OTHER; note = 2'-O-methoxyethyl modified nucleotide with phosphorothioate linkage
  modified_base 5: mod_base = OTHER; note = 2'-O-methoxyethyl modified nucleotide with phosphorothioate linkage
  modified_base 6: mod_base = OTHER; note = Nucleotide with phosphorothioate linkage
  modified_base 7: mod_base = OTHER; note = Thymine with phosphorothioate linkage
  modified_base 8: mod_base = OTHER; note = Nucleotide with phosphorothioate linkage
  modified_base 9: mod_base = OTHER; note = Nucleotide with phosphorothioate linkage
  modified_base 10: mod_base = OTHER; note = Nucleotide with phosphorothioate linkage
  modified_base 11: mod_base = OTHER; note = 8-amino-guanosine with phosphorothioate linkage
  modified_base 12: mod_base = OTHER; note = 5-methylcytosine with phosphorothioate linkage
  modified_base 13: mod_base = OTHER; note = Nucleotide with phosphorothioate linkage
  modified_base 14: mod_base = OTHER; note = Nucleotide with phosphorothioate linkage
  modified_base 15: mod_base = OTHER; note = Nucleotide with phosphorothioate linkage
  modified_base 16: mod_base = OTHER; note = 2'-O-methyl modified nucleotide with phosphorothioate linkage
  modified_base 17: mod_base = OTHER; note = 2'-O-methoxyethyl modified thymine with phosphorothioate linkage
  modified_base 18: mod_base = OTHER; note = 2'-O-methyl modified nucleotide with phosphorothioate linkage
  modified_base 19: mod_base = OTHER; note = 2'-O-methoxyethyl 5-methylcytosine with phosphorothioate linkage
  modified_base 20: mod_base = OTHER; note = 2'-O-methoxyethyl modified nucleotide
  misc_feature 1..5: note = RNA
  misc_feature 6..15: note = DNA
  misc_feature 16..20: note = RNA
cagaggtgaagcgaagtgca

SEQ ID NO: 192 - DNA, 20 bp, synthetic construct
  source 1..20: mol_type = other DNA
  modified_base 1: mod_base = OTHER; note = 2'-O-methoxyethyl 5-methylcytosine with phosphorothioate linkage
  modified_base 2: mod_base = OTHER; note = 2'-O-methoxyethyl modified nucleotide with phosphorothioate linkage
  modified_base 3: mod_base = OTHER; note = 2'-O-methyl modified nucleotide with phosphorothioate linkage
  modified_base 4: mod_base = OTHER; note = 2'-O-methoxyethyl modified nucleotide with phosphorothioate linkage
  modified_base 5: mod_base = OTHER; note = 2'-O-methyl modified nucleotide with phosphorothioate linkage
  modified_base 6: mod_base = OTHER; note = Nucleotide with phosphorothioate linkage
  modified_base 7: mod_base = OTHER; note = Thymine with phosphorothioate linkage
  modified_base 8: mod_base = OTHER; note = Nucleotide with phosphorothioate linkage
  modified_base 9: mod_base = OTHER; note = Nucleotide with phosphorothioate linkage
  modified_base 10: mod_base = OTHER; note = Nucleotide with phosphorothioate linkage
  modified_base 11: mod_base = OTHER; note = 8-amino-guanosine with phosphorothioate linkage
  modified_base 12: mod_base = OTHER; note = 5-methylcytosine with phosphorothioate linkage
  modified_base 13: mod_base = OTHER; note = Nucleotide with phosphorothioate linkage
  modified_base 14: mod_base = OTHER; note = Nucleotide with phosphorothioate linkage
  modified_base 15: mod_base = OTHER; note = Nucleotide with phosphorothioate linkage
  modified_base 16: mod_base = OTHER; note = 2'-O-methyl modified nucleotide with phosphorothioate linkage
  modified_base 17: mod_base = OTHER; note = 2'-O-methoxyethyl modified thymine with phosphorothioate linkage
  modified_base 18: mod_base = OTHER; note = 2'-O-methoxyethyl modified nucleotide with phosphorothioate linkage
  modified_base 19: mod_base = OTHER; note = 2'-O-methoxyethyl 5-methylcytosine with phosphorothioate linkage
  modified_base 20: mod_base = OTHER; note = 2'-O-methoxyethyl modified nucleotide
  misc_feature 1..5: note = RNA
  misc_feature 6..15: note = DNA
  misc_feature 16..20: note = RNA
cagaggtgaagcgaagtgca

SEQ ID NO: 193 - DNA, 20 bp, synthetic construct
  source 1..20: mol_type = other DNA
  modified_base 1: mod_base = OTHER; note = 2'-O-methoxyethyl 5-methylcytosine with phosphorothioate linkage
  modified_base 2: mod_base = OTHER; note = 2'-O-methoxyethyl modified nucleotide with phosphorothioate linkage
  modified_base 3: mod_base = OTHER; note = 2'-O-methyl modified nucleotide with phosphorothioate linkage
  modified_base 4: mod_base = OTHER; note = 2'-O-methoxyethyl modified nucleotide with phosphorothioate linkage
  modified_base 5: mod_base = OTHER; note = 2'-O-methyl modified nucleotide with phosphorothioate linkage
  modified_base 6: mod_base = OTHER; note = Nucleotide with phosphorothioate linkage
  modified_base 7: mod_base = OTHER; note = Thymine with phosphorothioate linkage
  modified_base 8: mod_base = OTHER; note = Nucleotide with phosphorothioate linkage
  modified_base 9: mod_base = OTHER; note = Nucleotide with phosphorothioate linkage
  modified_base 10: mod_base = OTHER; note = Nucleotide with phosphorothioate linkage
  modified_base 11: mod_base = OTHER; note = 8-amino-guanosine with phosphorothioate linkage
  modified_base 12: mod_base = OTHER; note = 5-methylcytosine with phosphorothioate linkage
  modified_base 13: mod_base = OTHER; note = Nucleotide with phosphorothioate linkage
  modified_base 14: mod_base = OTHER; note = Nucleotide with phosphorothioate linkage
  modified_base 15: mod_base = OTHER; note = Nucleotide with phosphorothioate linkage
  modified_base 16: mod_base = OTHER; note = 2'-O-methoxyethyl modified nucleotide with phosphorothioate linkage
  modified_base 17: mod_base = OTHER; note = 2'-O-methoxyethyl modified thymine with phosphorothioate linkage
  modified_base 18: mod_base = OTHER; note = 2'-O-methyl modified nucleotide with phosphorothioate linkage
  modified_base 19: mod_base = OTHER; note = 2'-O-methoxyethyl 5-methylcytosine with phosphorothioate linkage
  modified_base 20: mod_base = OTHER; note = 2'-O-methoxyethyl modified nucleotide
  misc_feature 1..5: note = RNA
  misc_feature 6..15: note = DNA
  misc_feature 16..20: note = RNA
cagaggtgaagcgaagtgca

SEQ ID NO: 194 - DNA, 20 bp, synthetic construct
  source 1..20: mol_type = other DNA
  modified_base 1: mod_base = OTHER; note = 2'-O-methoxyethyl 5-methylcytosine with phosphorothioate linkage
  modified_base 2: mod_base = OTHER; note = 2'-O-methoxyethyl modified nucleotide with phosphorothioate linkage
  modified_base 3: mod_base = OTHER; note = 2'-O-methyl modified nucleotide with phosphorothioate linkage
  modified_base 4: mod_base = OTHER; note = 2'-O-methoxyethyl modified nucleotide with phosphorothioate linkage
  modified_base 5: mod_base = OTHER; note = 2'-O-methoxyethyl modified nucleotide with phosphorothioate linkage
  modified_base 6: mod_base = OTHER; note = Nucleotide with phosphorothioate linkage
  modified_base 7: mod_base = OTHER; note = Thymine with phosphorothioate linkage
  modified_base 8: mod_base = OTHER; note = Nucleotide with phosphorothioate linkage
  modified_base 9: mod_base = OTHER; note = Nucleotide with phosphorothioate linkage
  modified_base 10: mod_base = OTHER; note = Nucleotide with phosphorothioate linkage
  modified_base 11: mod_base = OTHER; note = 8-amino-guanosine with phosphorothioate linkage
  modified_base 12: mod_base = OTHER; note = 5-methylcytosine with phosphorothioate linkage
  modified_base 13: mod_base = OTHER; note = Nucleotide with phosphorothioate linkage
  modified_base 14: mod_base = OTHER; note = Nucleotide with phosphorothioate linkage
  modified_base 15: mod_base = OTHER; note = Nucleotide with phosphorothioate linkage
  modified_base 16: mod_base = OTHER; note = 2'-O-methyl modified nucleotide with phosphorothioate linkage
  modified_base 17: mod_base = OTHER; note = 2'-O-methoxyethyl modified thymine with phosphorothioate linkage
  modified_base 18: mod_base = OTHER; note = 2'-O-methyl modified nucleotide with phosphorothioate linkage
  modified_base 19: mod_base = OTHER; note = 2'-O-methoxyethyl 5-methylcytosine with phosphorothioate linkage
  modified_base 20: mod_base = OTHER; note = 2'-O-methoxyethyl modified nucleotide
  misc_feature 1..5: note = RNA
  misc_feature 6..15: note = DNA
  misc_feature 16..20: note = RNA
cagaggtgaagcgaagtgca

SEQ ID NO: 195 - DNA, 20 bp, synthetic construct
  source 1..20: mol_type = other DNA
  modified_base 1: mod_base = OTHER; note = 2'-O-methoxyethyl 5-methylcytosine with phosphorothioate linkage
  modified_base 2: mod_base = OTHER; note = 2'-O-methoxyethyl modified nucleotide with phosphorothioate linkage
  modified_base 3: mod_base = OTHER; note = 2'-O-methoxyethyl modified nucleotide with phosphorothioate linkage
  modified_base 4: mod_base = OTHER; note = 2'-O-methoxyethyl modified nucleotide with phosphorothioate linkage
  modified_base 5: mod_base = OTHER; note = 2'-O-methyl modified nucleotide with phosphorothioate linkage
  modified_base 6: mod_base = OTHER; note = Nucleotide with phosphorothioate linkage
  modified_base 7: mod_base = OTHER; note = Thymine with phosphorothioate linkage
  modified_base 8: mod_base = OTHER; note = Nucleotide with phosphorothioate linkage
  modified_base 9: mod_base = OTHER; note = Nucleotide with phosphorothioate linkage
  modified_base 10: mod_base = OTHER; note = Nucleotide with phosphorothioate linkage
  modified_base 11: mod_base = OTHER; note = 8-amino-guanosine with phosphorothioate linkage
  modified_base 12: mod_base = OTHER; note = 5-methylcytosine with phosphorothioate linkage
  modified_base 13: mod_base = OTHER; note = Nucleotide with phosphorothioate linkage
  modified_base 14: mod_base = OTHER; note = Nucleotide with phosphorothioate linkage
  modified_base 15: mod_base = OTHER; note = Nucleotide with phosphorothioate linkage
  modified_base 16: mod_base = OTHER; note = 2'-O-methyl modified nucleotide with phosphorothioate linkage
  modified_base 17: mod_base = OTHER; note = 2'-O-methoxyethyl modified thymine with phosphorothioate linkage
  modified_base 18: mod_base = OTHER; note = 2'-O-methyl modified nucleotide with phosphorothioate linkage
  modified_base 19: mod_base = OTHER; note = 2'-O-methoxyethyl 5-methylcytosine with phosphorothioate linkage
  modified_base 20: mod_base = OTHER; note = 2'-O-methoxyethyl modified nucleotide
  misc_feature 1..5: note = RNA
  misc_feature 6..15: note = DNA
  misc_feature 16..20: note = RNA
cagaggtgaagcgaagtgca

SEQ ID NO: 196 - DNA, 20 bp, synthetic construct
  source 1..20: mol_type = other DNA
  modified_base 1: mod_base = OTHER; note = 2'-O-methoxyethyl 5-methylcytosine with phosphorothioate linkage
  modified_base 2: mod_base = OTHER; note = 2'-O-methoxyethyl modified nucleotide with phosphorothioate linkage
  modified_base 3: mod_base = OTHER; note = 2'-O-methyl modified nucleotide with phosphorothioate linkage
  modified_base 4: mod_base = OTHER; note = 2'-O-methoxyethyl modified nucleotide with phosphorothioate linkage
  modified_base 5: mod_base = OTHER; note = 2'-O-methyl modified nucleotide with phosphorothioate linkage
  modified_base 6: mod_base = OTHER; note = Nucleotide with phosphorothioate linkage
  modified_base 7: mod_base = OTHER; note = Thymine with phosphorothioate linkage
  modified_base 8: mod_base = OTHER; note = Nucleotide with phosphorothioate linkage
  modified_base 9: mod_base = OTHER; note = Nucleotide with phosphorothioate linkage
  modified_base 10: mod_base = OTHER; note = Nucleotide with phosphorothioate linkage
  modified_base 11: mod_base = OTHER; note = 8-amino-guanosine with phosphorothioate linkage
  modified_base 12: mod_base = OTHER; note = 5-methylcytosine with phosphorothioate linkage
  modified_base 13: mod_base = OTHER; note = Nucleotide with phosphorothioate linkage
  modified_base 14: mod_base = OTHER; note = Nucleotide with phosphorothioate linkage
  modified_base 15: mod_base = OTHER; note = Nucleotide with phosphorothioate linkage
  modified_base 16: mod_base = OTHER; note = 2'-O-methyl modified nucleotide with phosphorothioate linkage
  modified_base 17: mod_base = OTHER; note = 2'-O-methoxyethyl modified thymine with phosphorothioate linkage
  modified_base 18: mod_base = OTHER; note = 2'-O-methyl modified nucleotide with phosphorothioate linkage
  modified_base 19: mod_base = OTHER; note = 2'-O-methoxyethyl 5-methylcytosine with phosphorothioate linkage
  modified_base 20: mod_base = OTHER; note = 2'-O-methoxyethyl modified nucleotide
  misc_feature 1..5: note = RNA
  misc_feature 6..15: note = DNA
  misc_feature 16..20: note = RNA
cagaggtgaagcgaagtgca

SEQ ID NO: 197 - DNA, 20 bp, synthetic construct
  source 1..20: mol_type = other DNA
  modified_base 1: mod_base = OTHER; note = 2'-O-methoxyethyl 5-methylcytosine with phosphorothioate linkage
  modified_base 2: mod_base = OTHER; note = 2'-O-methoxyethyl modified nucleotide with phosphorothioate linkage
  modified_base 3: mod_base = OTHER; note = 2'-O-methoxyethyl modified nucleotide with phosphorothioate linkage
  modified_base 4: mod_base = OTHER; note = 2'-O-methoxyethyl modified nucleotide with phosphorothioate linkage
  modified_base 5: mod_base = OTHER; note = 2'-O-methoxyethyl modified nucleotide with phosphorothioate linkage
  modified_base 6: mod_base = OTHER; note = Nucleotide with phosphorothioate linkage
  modified_base 7: mod_base = OTHER; note = Thymine with phosphorothioate linkage
  modified_base 8: mod_base = OTHER; note = Nucleotide with phosphorothioate linkage
  modified_base 9: mod_base = OTHER; note = Nucleotide with phosphorothioate linkage
  modified_base 10: mod_base = OTHER; note = Nucleotide with phosphorothioate linkage
  modified_base 11: mod_base = OTHER; note = 8-amino-guanosine with phosphorothioate linkage
  modified_base 12: mod_base = OTHER; note = 5-methylcytosine with phosphorothioate linkage
  modified_base 13: mod_base = OTHER; note = Nucleotide with phosphorothioate linkage
  modified_base 14: mod_base = OTHER; note = Nucleotide with phosphorothioate linkage
  modified_base 15: mod_base = OTHER; note = Nucleotide with phosphorothioate linkage
  modified_base 16: mod_base = OTHER; note = 2'-O-methoxyethyl modified nucleotide with phosphorothioate linkage
  modified_base 17: mod_base = OTHER; note = 2'-O-methoxyethyl modified thymine with phosphorothioate linkage
  modified_base 18: mod_base = OTHER; note = 2'-O-methyl modified nucleotide with phosphorothioate linkage
  modified_base 19: mod_base = OTHER; note = 2'-O-methyl 5-methylcytosine with phosphorothioate linkage
  modified_base 20: mod_base = OTHER; note = 2'-O-methoxyethyl modified nucleotide
  misc_feature 1..5: note = RNA
  misc_feature 6..15: note = DNA
  misc_feature 16..20: note = RNA
cagaggtgaagcgaagtgca

SEQ ID NO: 198 - DNA, 20 bp, synthetic construct
  source 1..20: mol_type = other DNA
  modified_base 1: mod_base = OTHER; note = 2'-O-methoxyethyl 5-methylcytosine with phosphorothioate linkage
  modified_base 2: mod_base = OTHER; note = 2'-O-methoxyethyl modified nucleotide with phosphorothioate linkage
  modified_base 3: mod_base = OTHER; note = 2'-O-methoxyethyl modified nucleotide with phosphorothioate linkage
  modified_base 4: mod_base = OTHER; note = 2'-O-methoxyethyl modified nucleotide with phosphorothioate linkage
  modified_base 5: mod_base = OTHER; note = 2'-O-methoxyethyl modified nucleotide with phosphorothioate linkage
  modified_base 6: mod_base = OTHER; note = Nucleotide with phosphorothioate linkage
  modified_base 7: mod_base = OTHER; note = Thymine with phosphorothioate linkage
  modified_base 8: mod_base = OTHER; note = Nucleotide with phosphorothioate linkage
  modified_base 9: mod_base = OTHER; note = Nucleotide with phosphorothioate linkage
  modified_base 10: mod_base = OTHER; note = Nucleotide with phosphorothioate linkage
  modified_base 11: mod_base = OTHER; note = 8-amino-guanosine with phosphorothioate linkage
  modified_base 12: mod_base = OTHER; note = 5-methylcytosine with phosphorothioate linkage
  modified_base 13: mod_base = OTHER; note = Nucleotide with phosphorothioate linkage
  modified_base 14: mod_base = OTHER; note = Nucleotide with phosphorothioate linkage
  modified_base 15: mod_base = OTHER; note = Nucleotide with phosphorothioate linkage
  modified_base 16: mod_base = OTHER; note = 2'-O-methoxyethyl modified nucleotide with phosphorothioate linkage
  modified_base 17: mod_base = OTHER; note = 2'-O-methoxyethyl modified thymine with phosphorothioate linkage
  modified_base 18: mod_base = OTHER; note = 2'-O-methyl modified nucleotide with phosphorothioate linkage
  modified_base 19: mod_base = OTHER; note = 2'-O-methyl 5-methylcytosine with phosphorothioate linkage
  modified_base 20: mod_base = OTHER; note = 2'-O-methyl modified nucleotide
  misc_feature 1..5: note = RNA
  misc_feature 6..15: note = DNA
  misc_feature 16..20: note = RNA
cagaggtgaagcgaagtgca

SEQ ID NO: 199 - DNA, 20 bp, synthetic construct
  source 1..20: mol_type = other DNA
  modified_base 1: mod_base = OTHER; note = 2'-O-methoxyethyl 5-methylcytosine with phosphorothioate linkage
  modified_base 2: mod_base = OTHER; note = 2'-O-methoxyethyl modified nucleotide with phosphorothioate linkage
  modified_base 3: mod_base = OTHER; note = 2'-O-methoxyethyl modified nucleotide with phosphorothioate linkage
  modified_base 4: mod_base = OTHER; note = 2'-O-methoxyethyl modified nucleotide with phosphorothioate linkage
  modified_base 5: mod_base = OTHER; note = 2'-O-methoxyethyl modified nucleotide with phosphorothioate linkage
  modified_base 6: mod_base = OTHER; note = Nucleotide with phosphorothioate linkage
  modified_base 7: mod_base = OTHER; note = Thymine with phosphorothioate linkage
  modified_base 8: mod_base = OTHER; note = Nucleotide with phosphorothioate linkage
  modified_base 9: mod_base = OTHER; note = Nucleotide with phosphorothioate linkage
  modified_base 10: mod_base = OTHER; note = Nucleotide with phosphorothioate linkage
  modified_base 11: mod_base = OTHER; note = 8-amino-guanosine with phosphorothioate linkage
  modified_base 12: mod_base = OTHER; note = 5-methylcytosine with phosphorothioate linkage
  modified_base 13: mod_base = OTHER; note = Nucleotide with phosphorothioate linkage
  modified_base 14: mod_base = OTHER; note = Nucleotide with phosphorothioate linkage
  modified_base 15: mod_base = OTHER; note = Nucleotide with phosphorothioate linkage
  modified_base 16: mod_base = OTHER; note = 2'-O-methyl modified nucleotide with phosphorothioate linkage
  modified_base 17: mod_base = OTHER; note = 2'-O-methoxyethyl modified thymine with phosphorothioate linkage
  modified_base 18: mod_base = OTHER; note = 2'-O-methyl modified nucleotide with phosphorothioate linkage
  modified_base 19: mod_base = OTHER; note = 2'-O-methoxyethyl 5-methylcytosine with phosphorothioate linkage
  modified_base 20: mod_base = OTHER; note = 2'-O-methyl modified nucleotide
  misc_feature 1..5: note = RNA
  misc_feature 6..15: note = DNA
  misc_feature 16..20: note = RNA
cagaggtgaagcgaagtgca

SEQ ID NO: 200 - DNA, 20 bp, synthetic construct
  source 1..20: mol_type = other DNA
  modified_base 1: mod_base = OTHER; note = Locked 5-methylcytosine with phosphorothioate linkage
  modified_base 2: mod_base = OTHER; note = 2'-O-methoxyethyl modified nucleotide with phosphorothioate linkage
  modified_base 3: mod_base = OTHER; note = 2'-O-methoxyethyl modified nucleotide with phosphorothioate linkage
  modified_base 4: mod_base = OTHER; note = 2'-O-methoxyethyl modified nucleotide with phosphorothioate linkage
  modified_base 5: mod_base = OTHER; note = 2'-O-methoxyethyl modified nucleotide with phosphorothioate linkage
  modified_base 6: mod_base = OTHER; note = Nucleotide with phosphorothioate linkage
  modified_base 7: mod_base = OTHER; note = Thymine with phosphorothioate linkage
  modified_base 8: mod_base = OTHER; note = Nucleotide with phosphorothioate linkage
  modified_base 9: mod_base = OTHER; note = Nucleotide with phosphorothioate linkage
  modified_base 10: mod_base = OTHER; note = Nucleotide with phosphorothioate linkage
  modified_base 11: mod_base = OTHER; note = 8-amino-guanosine with phosphorothioate linkage
  modified_base 12: mod_base = OTHER; note = 5-methylcytosine with phosphorothioate linkage
  modified_base 13: mod_base = OTHER; note = Nucleotide with phosphorothioate linkage
  modified_base 14: mod_base = OTHER; note = Nucleotide with phosphorothioate linkage
  modified_base 15: mod_base = OTHER; note = Nucleotide with phosphorothioate linkage
  modified_base 16: mod_base = OTHER; note = 2'-O-methoxyethyl modified nucleotide with phosphorothioate linkage
  modified_base 17: mod_base = OTHER; note = 2'-O-methoxyethyl modified thymine with phosphorothioate linkage
  modified_base 18: mod_base = OTHER; note = 2'-O-methoxyethyl modified nucleotide with phosphorothioate linkage
  modified_base 19: mod_base = OTHER; note = 2'-O-methoxyethyl 5-methylcytosine with phosphorothioate linkage
  modified_base 20: mod_base = OTHER; note = 2'-O-methoxyethyl modified nucleotide
  misc_feature 1..5: note = RNA
  misc_feature 6..15: note = DNA
  misc_feature 16..20: note = RNA
cagaggtgaagcgaagtgca

SEQ ID NO: 201 - DNA, 20 bp, synthetic construct
  source 1..20: mol_type = other DNA
  modified_base 1: mod_base = OTHER; note = 2'-O-methoxyethyl 5-methylcytosine with phosphorothioate linkage
  modified_base 2: mod_base = OTHER; note = Locked nucleic acid with phosphorothioate linkage
  modified_base 3: mod_base = OTHER; note = 2'-O-methoxyethyl modified nucleotide with phosphorothioate linkage
  modified_base 4: mod_base = OTHER; note = 2'-O-methoxyethyl modified nucleotide with phosphorothioate linkage
  modified_base 5: mod_base = OTHER; note = 2'-O-methoxyethyl modified nucleotide with phosphorothioate linkage
  modified_base 6: mod_base = OTHER; note = Nucleotide with phosphorothioate linkage
  modified_base 7: mod_base = OTHER; note = Thymine with phosphorothioate linkage
  modified_base 8: mod_base = OTHER; note = Nucleotide with phosphorothioate linkage
  modified_base 9: mod_base = OTHER; note = Nucleotide with phosphorothioate linkage
  modified_base 10: mod_base = OTHER; note = Nucleotide with phosphorothioate linkage
  modified_base 11: mod_base = OTHER; note = 8-amino-guanosine with phosphorothioate linkage
  modified_base 12: mod_base = OTHER; note = 5-methylcytosine with phosphorothioate linkage
  modified_base 13: mod_base = OTHER; note = Nucleotide with phosphorothioate linkage
  modified_base 14: mod_base = OTHER; note = Nucleotide with phosphorothioate linkage
  modified_base 15: mod_base = OTHER; note = Nucleotide with phosphorothioate linkage
  modified_base 16: mod_base = OTHER; note = 2'-O-methoxyethyl modified nucleotide with phosphorothioate linkage
  modified_base 17: mod_base = OTHER; note = 2'-O-methoxyethyl modified thymine with phosphorothioate linkage
  modified_base 18: mod_base = OTHER; note = 2'-O-methoxyethyl modified nucleotide with phosphorothioate linkage
  modified_base 19: mod_base = OTHER; note = 2'-O-methoxyethyl 5-methylcytosine with phosphorothioate linkage
  modified_base 20: mod_base = OTHER; note = 2'-O-methoxyethyl modified nucleotide
  misc_feature 1..5: note = RNA
  misc_feature 6..15: note = DNA
  misc_feature 16..20: note = RNA
cagaggtgaagcgaagtgca

SEQ ID NO: 202 - DNA, 20 bp, synthetic construct
  source 1..20: mol_type = other DNA
  modified_base 1: mod_base = OTHER; note = 2'-O-methoxyethyl 5-methylcytosine with phosphorothioate linkage
  modified_base 2: mod_base = OTHER; note = 2'-O-methoxyethyl modified nucleotide with phosphorothioate linkage
  modified_base 3: mod_base = OTHER; note = Locked nucleic acid with phosphorothioate linkage
  modified_base 4: mod_base = OTHER; note = 2'-O-methoxyethyl modified nucleotide with phosphorothioate linkage
  modified_base 5: mod_base = OTHER; note = 2'-O-methoxyethyl modified nucleotide with phosphorothioate linkage
  modified_base 6: mod_base = OTHER; note = Nucleotide with phosphorothioate linkage
  modified_base 7: mod_base = OTHER; note = Thymine with phosphorothioate linkage
  modified_base 8: mod_base = OTHER; note = Nucleotide with phosphorothioate linkage
  modified_base 9: mod_base = OTHER; note = Nucleotide with phosphorothioate linkage
  modified_base 10: mod_base = OTHER; note = Nucleotide with phosphorothioate linkage
  modified_base 11: mod_base = OTHER; note = 8-amino-guanosine with phosphorothioate linkage
  modified_base 12: mod_base = OTHER; note = 5-methylcytosine with phosphorothioate linkage
  modified_base 13: mod_base = OTHER; note = Nucleotide with phosphorothioate linkage
  modified_base 14: mod_base = OTHER; note = Nucleotide with phosphorothioate linkage
  modified_base 15: mod_base = OTHER; note = Nucleotide with phosphorothioate linkage
  modified_base 16: mod_base = OTHER; note = 2'-O-methoxyethyl modified nucleotide with phosphorothioate linkage
  modified_base 17: mod_base = OTHER; note = 2'-O-methoxyethyl modified thymine with phosphorothioate linkage
  modified_base 18: mod_base = OTHER; note = 2'-O-methoxyethyl modified nucleotide with phosphorothioate linkage
  modified_base 19: mod_base = OTHER; note = 2'-O-methoxyethyl 5-methylcytosine with phosphorothioate linkage
  modified_base 20: mod_base = OTHER; note = 2'-O-methoxyethyl modified nucleotide
  misc_feature 1..5: note = RNA
  misc_feature 6..15: note = DNA
  misc_feature 16..20: note = RNA
cagaggtgaagcgaagtgca

SEQ ID NO: 203 - DNA, 20 bp, synthetic construct
  source 1..20: mol_type = other DNA
  modified_base 1: mod_base = OTHER; note = 2'-O-methoxyethyl 5-methylcytosine with phosphorothioate linkage
  modified_base 2: mod_base = OTHER; note = 2'-O-methoxyethyl modified nucleotide with phosphorothioate linkage
  modified_base 3: mod_base = OTHER; note = 2'-O-methoxyethyl modified nucleotide with phosphorothioate linkage
  modified_base 4: mod_base = OTHER; note = Locked nucleic acid with phosphorothioate linkage
  modified_base 5: mod_base = OTHER; note = 2'-O-methoxyethyl modified nucleotide with phosphorothioate linkage
  modified_base 6: mod_base = OTHER; note = Nucleotide with phosphorothioate linkage
  modified_base 7: mod_base = OTHER; note = Thymine with phosphorothioate linkage
  modified_base 8: mod_base = OTHER; note = Nucleotide with phosphorothioate linkage
  modified_base 9: mod_base = OTHER; note = Nucleotide with phosphorothioate linkage
  modified_base 10: mod_base = OTHER; note = Nucleotide with phosphorothioate linkage
  modified_base 11: mod_base = OTHER; note = 8-amino-guanosine with phosphorothioate linkage
  modified_base 12: mod_base = OTHER; note = 5-methylcytosine with phosphorothioate linkage
  modified_base 13: mod_base = OTHER; note = Nucleotide with phosphorothioate linkage
  modified_base 14: mod_base = OTHER; note = Nucleotide with phosphorothioate linkage
  modified_base 15: mod_base = OTHER; note = Nucleotide with phosphorothioate linkage
  modified_base 16: mod_base = OTHER; note = 2'-O-methoxyethyl modified nucleotide with phosphorothioate linkage
  modified_base 17: mod_base = OTHER; note = 2'-O-methoxyethyl modified thymine with phosphorothioate linkage
  modified_base 18: mod_base = OTHER; note = 2'-O-methoxyethyl modified nucleotide with phosphorothioate linkage
  modified_base 19: mod_base = OTHER; note = 2'-O-methoxyethyl 5-methylcytosine with phosphorothioate linkage
  modified_base 20: mod_base = OTHER; note = 2'-O-methoxyethyl modified nucleotide
  misc_feature 1..5: note = RNA
  misc_feature 6..15: note = DNA
  misc_feature 16..20: note = RNA
cagaggtgaagcgaagtgca

SEQ ID NO: 204 - DNA, 20 bp, synthetic construct
  source 1..20: mol_type = other DNA
  modified_base 1: mod_base = OTHER; note = 2'-O-methoxyethyl 5-methylcytosine with phosphorothioate linkage
  modified_base 2: mod_base = OTHER; note = 2'-O-methoxyethyl modified nucleotide with phosphorothioate linkage
  modified_base 3: mod_base = OTHER; note = 2'-O-methoxyethyl modified nucleotide with phosphorothioate linkage
  modified_base 4: mod_base = OTHER; note = 2'-O-methoxyethyl modified nucleotide with phosphorothioate linkage
  modified_base 5: mod_base = OTHER; note = Locked nucleic acid with phosphorothioate linkage
  modified_base 6: mod_base = OTHER; note = Nucleotide with phosphorothioate linkage
  modified_base 7: mod_base = OTHER; note = Thymine with phosphorothioate linkage
  modified_base 8: mod_base = OTHER; note = Nucleotide with phosphorothioate linkage
  modified_base 9: mod_base = OTHER; note = Nucleotide with phosphorothioate linkage
  modified_base 10: mod_base = OTHER; note = Nucleotide with phosphorothioate linkage
  modified_base 11: mod_base = OTHER; note = 8-amino-guanosine with phosphorothioate linkage
  modified_base 12: mod_base = OTHER; note = 5-methylcytosine with phosphorothioate linkage
  modified_base 13: mod_base = OTHER; note = Nucleotide with phosphorothioate linkage
  modified_base 14: mod_base = OTHER; note = Nucleotide with phosphorothioate linkage
  modified_base 15: mod_base = OTHER; note = Nucleotide with phosphorothioate linkage
  modified_base 16: mod_base = OTHER; note = 2'-O-methoxyethyl modified nucleotide with phosphorothioate linkage
  modified_base 17: mod_base = OTHER; note = 2'-O-methoxyethyl modified thymine with phosphorothioate linkage
  modified_base 18: mod_base = OTHER; note = 2'-O-methoxyethyl modified nucleotide with phosphorothioate linkage
  modified_base 19: mod_base = OTHER; note = 2'-O-methoxyethyl 5-methylcytosine with phosphorothioate linkage
  modified_base 20: mod_base = OTHER; note = 2'-O-methoxyethyl modified nucleotide
  misc_feature 1..5: note = RNA
  misc_feature 6..15: note = DNA
  misc_feature 16..20: note = RNA
cagaggtgaagcgaagtgca

SEQ ID NO: 205 - DNA, 20 bp, synthetic construct
  source 1..20: mol_type = other DNA
  modified_base 1: mod_base = OTHER; note = 2'-O-methoxyethyl 5-methylcytosine with phosphorothioate linkage
  modified_base 2: mod_base = OTHER; note = 2'-O-methoxyethyl modified nucleotide with phosphorothioate linkage
  modified_base 3: mod_base = OTHER; note = 2'-O-methoxyethyl modified nucleotide with phosphorothioate linkage
  modified_base 4: mod_base = OTHER; note = 2'-O-methoxyethyl modified nucleotide with phosphorothioate linkage
  modified_base 5: mod_base = OTHER; note = 2'-O-methoxyethyl modified nucleotide with phosphorothioate linkage
  modified_base 6: mod_base = OTHER; note = Nucleotide with phosphorothioate linkage
  modified_base 7: mod_base = OTHER; note = Thymine with phosphorothioate linkage
  modified_base 8: mod_base = OTHER; note = Nucleotide with phosphorothioate linkage
  modified_base 9: mod_base = OTHER; note = Nucleotide with phosphorothioate linkage
  modified_base 10: mod_base = OTHER; note = Nucleotide with phosphorothioate linkage
  modified_base 11: mod_base = OTHER; note = 8-amino-guanosine with phosphorothioate linkage
  modified_base 12: mod_base = OTHER; note = 5-methylcytosine with phosphorothioate linkage
  modified_base 13: mod_base = OTHER; note = Nucleotide with phosphorothioate linkage
  modified_base 14: mod_base = OTHER; note = Nucleotide with phosphorothioate linkage
  modified_base 15: mod_base = OTHER; note = Nucleotide with phosphorothioate linkage
  modified_base 16: mod_base = OTHER; note = Locked nucleic acid with phosphorothioate linkage
  modified_base 17: mod_base = OTHER; note = 2'-O-methoxyethyl modified thymine with phosphorothioate linkage
  modified_base 18: mod_base = OTHER; note = 2'-O-methoxyethyl modified nucleotide with phosphorothioate linkage
  modified_base 19: mod_base = OTHER; note = 2'-O-methoxyethyl 5-methylcytosine with phosphorothioate linkage
  modified_base 20: mod_base = OTHER; note = 2'-O-methoxyethyl modified nucleotide
  misc_feature 1..5: note = RNA
  misc_feature 6..15: note = DNA
  misc_feature 16..20: note = RNA
cagaggtgaagcgaagtgca

SEQ ID NO: 206 - DNA, 20 bp, synthetic construct
  source 1..20: mol_type = other DNA
  modified_base 1: mod_base = OTHER; note = 2'-O-methoxyethyl 5-methylcytosine with phosphorothioate linkage
  modified_base 2: mod_base = OTHER; note = 2'-O-methoxyethyl modified nucleotide with phosphorothioate linkage
  modified_base 3: mod_base = OTHER; note = 2'-O-methoxyethyl modified nucleotide with phosphorothioate linkage
  modified_base 4: mod_base = OTHER; note = 2'-O-methoxyethyl modified nucleotide with phosphorothioate linkage
  modified_base 5: mod_base = OTHER; note = 2'-O-methoxyethyl modified nucleotide with phosphorothioate linkage
  modified_base 6: mod_base = OTHER; note = Nucleotide with phosphorothioate linkage
  modified_base 7: mod_base = OTHER; note = Thymine with phosphorothioate linkage
  modified_base 8: mod_base = OTHER; note = Nucleotide with phosphorothioate linkage
  modified_base 9: mod_base = OTHER; note = Nucleotide with phosphorothioate linkage
  modified_base 10: mod_base = OTHER; note = Nucleotide with phosphorothioate linkage
  modified_base 11: mod_base = OTHER; note = 8-amino-guanosine with phosphorothioate linkage
  modified_base 12: mod_base = OTHER; note = 5-methylcytosine with phosphorothioate linkage
  modified_base 13: mod_base = OTHER; note = Nucleotide with phosphorothioate linkage
  modified_base 14: mod_base = OTHER; note = Nucleotide with phosphorothioate linkage
  modified_base 15: mod_base = OTHER; note = Nucleotide with phosphorothioate linkage
  modified_base 16: mod_base = OTHER; note = 2'-O-methoxyethyl modified nucleotide with phosphorothioate linkage
  modified_base 17: mod_base = OTHER; note = Locked thymine with phosphorothioate linkage
  modified_base 18: mod_base = OTHER; note = 2'-O-methoxyethyl modified nucleotide with phosphorothioate linkage
  modified_base 19: mod_base = OTHER; note = 2'-O-methoxyethyl 5-methylcytosine with phosphorothioate linkage
  modified_base 20: mod_base = OTHER; note = 2'-O-methoxyethyl modified nucleotide
  misc_feature 1..5: note = RNA
  misc_feature 6..15: note = DNA
  misc_feature 16..20: note = RNA
cagaggtgaagcgaagtgca

SEQ ID NO: 207 - DNA, 20 bp, synthetic construct
  source 1..20: mol_type = other DNA
  modified_base 1: mod_base = OTHER; note = 2'-O-methoxyethyl 5-methylcytosine with phosphorothioate linkage
  modified_base 2: mod_base = OTHER; note = 2'-O-methoxyethyl modified nucleotide with phosphorothioate linkage
  modified_base 3: mod_base = OTHER; note = 2'-O-methoxyethyl modified nucleotide with phosphorothioate linkage
  modified_base 4: mod_base = OTHER; note = 2'-O-methoxyethyl modified nucleotide with phosphorothioate linkage
  modified_base 5: mod_base = OTHER; note = 2'-O-methoxyethyl modified nucleotide with phosphorothioate linkage
  modified_base 6: mod_base = OTHER; note = Nucleotide with phosphorothioate linkage
  modified_base 7: mod_base = OTHER; note = Thymine with phosphorothioate linkage
  modified_base 8: mod_base = OTHER; note = Nucleotide with phosphorothioate linkage
  modified_base 9: mod_base = OTHER; note = Nucleotide with phosphorothioate linkage
  modified_base 10: mod_base = OTHER; note = Nucleotide with phosphorothioate linkage
  modified_base 11: mod_base = OTHER; note = 8-amino-guanosine with phosphorothioate linkage
  modified_base 12: mod_base = OTHER; note = 5-methylcytosine with phosphorothioate linkage
  modified_base 13: mod_base = OTHER; note = Nucleotide with phosphorothioate linkage
  modified_base 14: mod_base = OTHER; note = Nucleotide with phosphorothioate linkage
  modified_base 15: mod_base = OTHER; note = Nucleotide with phosphorothioate linkage
  modified_base 16: mod_base = OTHER; note = 2'-O-methoxyethyl modified nucleotide with phosphorothioate linkage
  modified_base 17: mod_base = OTHER; note = 2'-O-methoxyethyl modified thymine with phosphorothioate linkage
  modified_base 18: mod_base = OTHER; note = Locked nucleic acid with phosphorothioate linkage
  modified_base 19: mod_base = OTHER; note = 2'-O-methoxyethyl 5-methylcytosine with phosphorothioate linkage
  modified_base 20: mod_base = OTHER; note = 2'-O-methoxyethyl modified nucleotide
  misc_feature 1..5: note = RNA
  misc_feature 6..15: note = DNA
  misc_feature 16..20: note = RNA
cagaggtgaagcgaagtgca

SEQ ID NO: 208 - DNA, 20 bp, synthetic construct
  source 1..20: mol_type = other DNA
  modified_base 1: mod_base = OTHER; note = 2'-O-methoxyethyl 5-methylcytosine with phosphorothioate linkage
  modified_base 2: mod_base = OTHER; note = 2'-O-methoxyethyl modified nucleotide with phosphorothioate linkage
  modified_base 3: mod_base = OTHER; note = 2'-O-methoxyethyl modified nucleotide with phosphorothioate linkage
  modified_base 4: mod_base = OTHER; note = 2'-O-methoxyethyl modified nucleotide with phosphorothioate linkage
  modified_base 5: mod_base = OTHER; note = 2'-O-methoxyethyl modified nucleotide with phosphorothioate linkage
  modified_base 6: mod_base = OTHER; note = Nucleotide with phosphorothioate linkage
  modified_base 7: mod_base = OTHER; note = Thymine with phosphorothioate linkage
  modified_base 8: mod_base = OTHER; note = Nucleotide with phosphorothioate linkage
  modified_base 9: mod_base = OTHER; note = Nucleotide with phosphorothioate linkage
  modified_base 10: mod_base = OTHER; note = Nucleotide with phosphorothioate linkage
  modified_base 11: mod_base = OTHER; note = 8-amino-guanosine with phosphorothioate linkage
  modified_base 12: mod_base = OTHER; note = 5-methylcytosine with phosphorothioate linkage
  modified_base 13: mod_base = OTHER; note = Nucleotide with phosphorothioate linkage
  modified_base 14: mod_base = OTHER; note = Nucleotide with phosphorothioate linkage
  modified_base 15: mod_base = OTHER; note = Nucleotide with phosphorothioate linkage
  modified_base 16: mod_base = OTHER; note = 2'-O-methoxyethyl modified nucleotide with phosphorothioate linkage
  modified_base 17: mod_base = OTHER; note = 2'-O-methoxyethyl modified thymine with phosphorothioate linkage
  modified_base 18: mod_base = OTHER; note = 2'-O-methoxyethyl modified nucleotide with phosphorothioate linkage
  modified_base 19: mod_base = OTHER; note = Locked 5-methylcytosine with phosphorothioate linkage
  modified_base 20: mod_base = OTHER; note = 2'-O-methoxyethyl modified nucleotide
  misc_feature 1..5: note = RNA
  misc_feature 6..15: note = DNA
  misc_feature 16..20: note = RNA
cagaggtgaagcgaagtgca

SEQ ID NO: 209 - DNA, 20 bp, synthetic construct
  source 1..20: mol_type = other DNA
  modified_base 1: mod_base = OTHER; note = 2'-O-methoxyethyl 5-methylcytosine with phosphorothioate linkage
  modified_base 2: mod_base = OTHER; note = 2'-O-methoxyethyl modified nucleotide with phosphorothioate linkage
  modified_base 3: mod_base = OTHER; note = 2'-O-methoxyethyl modified nucleotide with phosphorothioate linkage
  modified_base 4: mod_base = OTHER; note = 2'-O-methoxyethyl modified nucleotide with phosphorothioate linkage
  modified_base 5: mod_base = OTHER; note = 2'-O-methoxyethyl modified nucleotide with phosphorothioate linkage
  modified_base 6: mod_base = OTHER; note = Nucleotide with phosphorothioate linkage
  modified_base 7: mod_base = OTHER; note = Thymine with phosphorothioate linkage
  modified_base 8: mod_base = OTHER; note = Nucleotide with phosphorothioate linkage
  modified_base 9: mod_base = OTHER; note = Nucleotide with phosphorothioate linkage
  modified_base 10: mod_base = OTHER; note = Nucleotide with phosphorothioate linkage
  modified_base 11: mod_base = OTHER; note = 8-amino-guanosine with phosphorothioate linkage
  modified_base 12: mod_base = OTHER; note = 5-methylcytosine with phosphorothioate linkage
  modified_base 13: mod_base = OTHER; note = Nucleotide with phosphorothioate linkage
  modified_base 14: mod_base = OTHER; note = Nucleotide with phosphorothioate linkage
  modified_base 15: mod_base = OTHER; note = Nucleotide with phosphorothioate linkage
  modified_base 16: mod_base = OTHER; note = 2'-O-methoxyethyl modified nucleotide with phosphorothioate linkage
  modified_base 17: mod_base = OTHER; note = 2'-O-methoxyethyl modified thymine with phosphorothioate linkage
  modified_base 18: mod_base = OTHER; note = 2'-O-methoxyethyl modified nucleotide with phosphorothioate linkage
  modified_base 19: mod_base = OTHER; note = 2'-O-methoxyethyl 5-methylcytosine with phosphorothioate linkage
  modified_base 20: mod_base = OTHER; note = Locked nucleic acid
  misc_feature 1..5: note = RNA
  misc_feature 6..15: note = DNA
  misc_feature 16..20: note = RNA
cagaggtgaagcgaagtgca

SEQ ID NO: 210 - DNA, 20 bp, synthetic construct
  source 1..20: mol_type = other DNA
  modified_base 1: mod_base = OTHER; note = Locked 5-methylcytosine with phosphorothioate linkage
  modified_base 2: mod_base = OTHER; note = 2'-O-methoxyethyl modified nucleotide with phosphorothioate linkage
  modified_base 3: mod_base = OTHER; note = 2'-O-methoxyethyl modified nucleotide with phosphorothioate linkage
  modified_base 4: mod_base = OTHER; note = 2'-O-methoxyethyl modified nucleotide with phosphorothioate linkage
  modified_base 5: mod_base = OTHER; note = 2'-O-methoxyethyl modified nucleotide with phosphorothioate linkage
  modified_base 6: mod_base = OTHER; note = Nucleotide with phosphorothioate linkage
  modified_base 7: mod_base = OTHER; note = Thymine with phosphorothioate linkage
  modified_base 8: mod_base = OTHER; note = Nucleotide with phosphorothioate linkage
  modified_base 9: mod_base = OTHER; note = Nucleotide with phosphorothioate linkage
  modified_base 10: mod_base = OTHER; note = Nucleotide with phosphorothioate linkage
  modified_base 11: mod_base = OTHER; note = 8-amino-guanosine with phosphorothioate linkage
  modified_base 12: mod_base = OTHER; note = 5-methylcytosine with phosphorothioate linkage
  modified_base 13: mod_base = OTHER; note = Nucleotide with phosphorothioate linkage
  modified_base 14: mod_base = OTHER; note = Nucleotide with phosphorothioate linkage
  modified_base 15: mod_base = OTHER; note = Nucleotide with phosphorothioate linkage
  modified_base 16: mod_base = OTHER; note = 2'-O-methoxyethyl modified nucleotide with phosphorothioate linkage
  modified_base 17: mod_base = OTHER; note = Locked thymine with phosphorothioate linkage
  modified_base 18: mod_base = OTHER; note = 2'-O-methoxyethyl modified nucleotide with phosphorothioate linkage
  modified_base 19: mod_base = OTHER; note = 2'-O-methoxyethyl 5-methylcytosine with phosphorothioate linkage
  modified_base 20: mod_base = OTHER; note = 2'-O-methoxyethyl modified nucleotide
  misc_feature 1..5: note = RNA
  misc_feature 6..15: note = DNA
  misc_feature 16..20: note = RNA
cagaggtgaagcgaagtgca

SEQ ID NO: 211 - DNA, 20 bp, synthetic construct
  source 1..20: mol_type = other DNA
  modified_base 1: mod_base = OTHER; note = Locked 5-methylcytosine with phosphorothioate linkage
  modified_base 2: mod_base = OTHER; note = 2'-O-methoxyethyl modified nucleotide with phosphorothioate linkage
  modified_base 3: mod_base = OTHER; note = 2'-O-methoxyethyl modified nucleotide with phosphorothioate linkage
  modified_base 4: mod_base = OTHER; note = 2'-O-methoxyethyl modified nucleotide with phosphorothioate linkage
  modified_base 5: mod_base = OTHER; note = 2'-O-methoxyethyl modified nucleotide with phosphorothioate linkage
  modified_base 6: mod_base = OTHER; note = Nucleotide with phosphorothioate linkage
  modified_base 7: mod_base = OTHER; note = Thymine with phosphorothioate linkage
  modified_base 8: mod_base = OTHER; note = Nucleotide with phosphorothioate linkage
  modified_base 9: mod_base = OTHER; note = Nucleotide with phosphorothioate linkage
  modified_base 10: mod_base = OTHER; note = Nucleotide with phosphorothioate linkage
  modified_base 11: mod_base = OTHER; note = 8-amino-guanosine with phosphorothioate linkage
  modified_base 12: mod_base = OTHER; note = 5-methylcytosine with phosphorothioate linkage
  modified_base 13: mod_base = OTHER; note = Nucleotide with phosphorothioate linkage
  modified_base 14: mod_base = OTHER; note = Nucleotide with phosphorothioate linkage
  modified_base 15: mod_base = OTHER; note = Nucleotide with phosphorothioate linkage
  modified_base 16: mod_base = OTHER; note = 2'-O-methoxyethyl modified nucleotide with phosphorothioate linkage
  modified_base 17: mod_base = OTHER; note = 2'-O-methoxyethyl modified thymine with phosphorothioate linkage
  modified_base 18: mod_base = OTHER; note = 2'-O-methoxyethyl modified nucleotide with phosphorothioate linkage
  modified_base 19: mod_base = OTHER; note = Locked 5-methylcytosine with phosphorothioate linkage
  modified_base 20: mod_base = OTHER; note = 2'-O-methoxyethyl modified nucleotide
  misc_feature 1..5: note = RNA
  misc_feature 6..15: note = DNA
  misc_feature 16..20: note = RNA
cagaggtgaagcgaagtgca

SEQ ID NO: 212 - DNA, 20 bp, synthetic construct
  source 1..20: mol_type = other DNA
  modified_base 1: mod_base = OTHER; note = 2'-O-methoxyethyl 5-methylcytosine with phosphorothioate linkage
  modified_base 2: mod_base = OTHER; note = Locked nucleic acid with phosphorothioate linkage
  modified_base 3: mod_base = OTHER; note = 2'-O-methoxyethyl modified nucleotide with phosphorothioate linkage
  modified_base 4: mod_base = OTHER; note = Locked nucleic acid with phosphorothioate linkage
  modified_base 5: mod_base = OTHER; note = 2'-O-methoxyethyl modified nucleotide with phosphorothioate linkage
  modified_base 6: mod_base = OTHER; note = Nucleotide with phosphorothioate linkage
  modified_base 7: mod_base = OTHER; note = Thymine with phosphorothioate linkage
  modified_base 8: mod_base = OTHER; note = Nucleotide with phosphorothioate linkage
  modified_base 9: mod_base = OTHER; note = Nucleotide with phosphorothioate linkage
  modified_base 10: mod_base = OTHER; note = Nucleotide with phosphorothioate linkage
  modified_base 11: mod_base = OTHER; note = 8-amino-guanosine with phosphorothioate linkage
  modified_base 12: mod_base = OTHER; note = 5-methylcytosine with phosphorothioate linkage
  modified_base 13: mod_base = OTHER; note = Nucleotide with phosphorothioate linkage
  modified_base 14: mod_base = OTHER; note = Nucleotide with phosphorothioate linkage
  modified_base 15: mod_base = OTHER; note = Nucleotide with phosphorothioate linkage
  modified_base 16: mod_base = OTHER; note = 2'-O-methoxyethyl modified nucleotide with phosphorothioate linkage
  modified_base 17: mod_base = OTHER; note = 2'-O-methoxyethyl modified thymine with phosphorothioate linkage
  modified_base 18: mod_base = OTHER; note = 2'-O-methoxyethyl modified nucleotide with phosphorothioate linkage
  modified_base 19: mod_base = OTHER; note = 2'-O-methoxyethyl 5-methylcytosine with phosphorothioate linkage
  modified_base 20: mod_base = OTHER; note = 2'-O-methoxyethyl modified nucleotide
  misc_feature 1..5: note = RNA
  misc_feature 6..15: note = DNA
  misc_feature 16..20: note = RNA
cagaggtgaagcgaagtgca

SEQ ID NO: 213 - DNA, 20 bp, synthetic construct
  source 1..20: mol_type = other DNA
  modified_base 1: mod_base = OTHER; note = 2'-O-methoxyethyl 5-methylcytosine with phosphorothioate linkage
  modified_base 2: mod_base = OTHER; note = Locked nucleic acid with phosphorothioate linkage
  modified_base 3: mod_base = OTHER; note = 2'-O-methoxyethyl modified nucleotide with phosphorothioate linkage
  modified_base 4: mod_base = OTHER; note = 2'-O-methoxyethyl modified nucleotide with phosphorothioate linkage
  modified_base 5: mod_base = OTHER; note = 2'-O-methoxyethyl modified nucleotide with phosphorothioate linkage
  modified_base 6: mod_base = OTHER; note = Nucleotide with phosphorothioate linkage
  modified_base 7: mod_base = OTHER; note = Thymine with phosphorothioate linkage
  modified_base 8: mod_base = OTHER; note = Nucleotide with phosphorothioate linkage
  modified_base 9: mod_base = OTHER; note = Nucleotide with phosphorothioate linkage
  modified_base 10: mod_base = OTHER; note = Nucleotide with phosphorothioate linkage
  modified_base 11: mod_base = OTHER; note = 8-amino-guanosine with phosphorothioate linkage
  modified_base 12: mod_base = OTHER; note = 5-methylcytosine with phosphorothioate linkage
  modified_base 13: mod_base = OTHER; note = Nucleotide with phosphorothioate linkage
  modified_base 14: mod_base = OTHER; note = Nucleotide with phosphorothioate linkage
  modified_base 15: mod_base = OTHER; note = Nucleotide with phosphorothioate linkage
  modified_base 16: mod_base = OTHER; note = 2'-O-methoxyethyl modified nucleotide with phosphorothioate linkage
  modified_base 17: mod_base = OTHER; note = 2'-O-methoxyethyl modified thymine with phosphorothioate linkage
  modified_base 18: mod_base = OTHER; note = 2'-O-methoxyethyl modified nucleotide with phosphorothioate linkage
  modified_base 19: mod_base = OTHER; note = 2'-O-methoxyethyl 5-methylcytosine with phosphorothioate linkage
  modified_base 20: mod_base = OTHER; note = Locked nucleic acid
  misc_feature 1..5: note = RNA
  misc_feature 6..15: note = DNA
  misc_feature 16..20: note = RNA
cagaggtgaagcgaagtgca

SEQ ID NO: 214 - DNA, 20 bp, synthetic construct
  source 1..20: mol_type = other DNA
  modified_base 1: mod_base = OTHER; note = 2'-O-methoxyethyl 5-methylcytosine with phosphorothioate linkage
  modified_base 2: mod_base = OTHER; note = 2'-O-methoxyethyl modified nucleotide with phosphorothioate linkage
  modified_base 3: mod_base = OTHER; note = 2'-O-methoxyethyl modified nucleotide with phosphorothioate linkage
  modified_base 4: mod_base = OTHER; note = Locked nucleic acid with phosphorothioate linkage
  modified_base 5: mod_base = OTHER; note = 2'-O-methoxyethyl modified nucleotide with phosphorothioate linkage
  modified_base 6: mod_base = OTHER; note = Nucleotide with phosphorothioate linkage
  modified_base 7: mod_base = OTHER; note = Thymine with phosphorothioate linkage
  modified_base 8: mod_base = OTHER; note = Nucleotide with phosphorothioate linkage
  modified_base 9: mod_base = OTHER; note = Nucleotide with phosphorothioate linkage
  modified_base 10: mod_base = OTHER; note = Nucleotide with phosphorothioate linkage
  modified_base 11: mod_base = OTHER; note = 8-amino-guanosine with phosphorothioate linkage
  modified_base 12: mod_base = OTHER; note = 5-methylcytosine with phosphorothioate linkage
  modified_base 13: mod_base = OTHER; note = Nucleotide with phosphorothioate linkage
  modified_base 14: mod_base = OTHER; note = Nucleotide with phosphorothioate linkage
  modified_base 15: mod_base = OTHER; note = Nucleotide with phosphorothioate linkage
  modified_base 16: mod_base = OTHER; note = 2'-O-methoxyethyl modified nucleotide with phosphorothioate linkage
  modified_base 17: mod_base = OTHER; note = 2'-O-methoxyethyl modified thymine with phosphorothioate linkage
  modified_base 18: mod_base = OTHER; note = 2'-O-methoxyethyl modified nucleotide with phosphorothioate linkage
  modified_base 19: mod_base = OTHER; note = 2'-O-methoxyethyl 5-methylcytosine with phosphorothioate linkage
  modified_base 20: mod_base = OTHER; note = Locked nucleic acid
  misc_feature 1..5: note = RNA
  misc_feature 6..15: note = DNA
  misc_feature 16..20: note = RNA
cagaggtgaagcgaagtgca

SEQ ID NO: 215 - DNA, 20 bp, synthetic construct
  source 1..20: mol_type = other DNA
  modified_base 1: mod_base = OTHER; note = 2'-O-methoxyethyl 5-methylcytosine with phosphorothioate linkage
  modified_base 2: mod_base = OTHER; note = 2'-O-methoxyethyl modified nucleotide with phosphorothioate linkage
  modified_base 3: mod_base = OTHER; note = Locked nucleic acid with phosphorothioate linkage
  modified_base 4: mod_base = OTHER; note = 2'-O-methoxyethyl modified nucleotide with phosphorothioate linkage
  modified_base 5: mod_base = OTHER; note = Locked nucleic acid with phosphorothioate linkage
  modified_base 6: mod_base = OTHER; note = Nucleotide with phosphorothioate linkage
  modified_base 7: mod_base = OTHER; note = Thymine with phosphorothioate linkage
  modified_base 8: mod_base = OTHER; note = Nucleotide with phosphorothioate linkage
  modified_base 9: mod_base = OTHER; note = Nucleotide with phosphorothioate linkage
  modified_base 10: mod_base = OTHER; note = Nucleotide with phosphorothioate linkage
  modified_base 11: mod_base = OTHER; note = 8-amino-guanosine with phosphorothioate linkage
  modified_base 12: mod_base = OTHER; note = 5-methylcytosine with phosphorothioate linkage
  modified_base 13: mod_base = OTHER; note = Nucleotide with phosphorothioate linkage
  modified_base 14: mod_base = OTHER; note = Nucleotide with phosphorothioate linkage
  modified_base 15: mod_base = OTHER; note = Nucleotide with phosphorothioate linkage
  modified_base 16: mod_base = OTHER; note = 2'-O-methoxyethyl modified nucleotide with phosphorothioate linkage
  modified_base 17: mod_base = OTHER; note = 2'-O-methoxyethyl modified thymine with phosphorothioate linkage
  modified_base 18: mod_base = OTHER; note = 2'-O-methoxyethyl modified nucleotide with phosphorothioate linkage
  modified_base 19: mod_base = OTHER; note = 2'-O-methoxyethyl 5-methylcytosine with phosphorothioate linkage
  modified_base 20: mod_base = OTHER; note = 2'-O-methoxyethyl modified nucleotide
  misc_feature 1..5: note = RNA
  misc_feature 6..15: note = DNA
  misc_feature 16..20: note = RNA
cagaggtgaagcgaagtgca

SEQ ID NO: 216 - DNA, 20 bp, synthetic construct
  source 1..20: mol_type = other DNA
  modified_base 1: mod_base = OTHER; note = 2'-O-methoxyethyl 5-methylcytosine with phosphorothioate linkage
  modified_base 2: mod_base = OTHER; note = 2'-O-methoxyethyl modified nucleotide with phosphorothioate linkage
  modified_base 3: mod_base = OTHER; note = 2'-O-methoxyethyl modified nucleotide with phosphorothioate linkage
  modified_base 4: mod_base = OTHER; note = 2'-O-methoxyethyl modified nucleotide with phosphorothioate linkage
  modified_base 5: mod_base = OTHER; note = 2'-O-methoxyethyl modified nucleotide with phosphorothioate linkage
  modified_base 6: mod_base = OTHER; note = Nucleotide with phosphorothioate linkage
  modified_base 7: mod_base = OTHER; note = Thymine with phosphorothioate linkage
  modified_base 8: mod_base = OTHER; note = Nucleotide with phosphorothioate linkage
  modified_base 9: mod_base = OTHER; note = Nucleotide with phosphorothioate linkage
  modified_base 10: mod_base = OTHER; note = Nucleotide with phosphorothioate linkage
  modified_base 11: mod_base = OTHER; note = 8-amino-guanosine with phosphorothioate linkage
  modified_base 12: mod_base = OTHER; note = 5-methylcytosine with phosphorothioate linkage
  modified_base 13: mod_base = OTHER; note = Nucleotide with phosphorothioate linkage
  modified_base 14: mod_base = OTHER; note = Nucleotide with phosphorothioate linkage
  modified_base 15: mod_base = OTHER; note = Nucleotide with phosphorothioate linkage
  modified_base 16: mod_base = OTHER; note = Locked nucleic acid with phosphorothioate linkage
  modified_base 17: mod_base = OTHER; note = 2'-O-methoxyethyl modified thymine with phosphorothioate linkage
  modified_base 18: mod_base = OTHER; note = Locked nucleic acid with phosphorothioate linkage
  modified_base 19: mod_base = OTHER; note = 2'-O-methoxyethyl 5-methylcytosine with phosphorothioate linkage
  modified_base 20: mod_base = OTHER; note = 2'-O-methoxyethyl modified nucleotide
  misc_feature 1..5: note = RNA
  misc_feature 6..15: note = DNA
  misc_feature 16..20: note = RNA
cagaggtgaagcgaagtgca

SEQ ID NO: 217 - DNA, 20 bp, synthetic construct
  source 1..20: mol_type = other DNA
  modified_base 1: mod_base = OTHER; note = 2'-O-methoxyethyl 5-methylcytosine with phosphorothioate linkage
  modified_base 2: mod_base = OTHER; note = 2'-O-methoxyethyl modified nucleotide with phosphorothioate linkage
  modified_base 3: mod_base = OTHER; note = Locked nucleic acid with phosphorothioate linkage
  modified_base 4: mod_base = OTHER; note = 2'-O-methoxyethyl modified nucleotide with phosphorothioate linkage
  modified_base 5: mod_base = OTHER; note = 2'-O-methoxyethyl modified nucleotide with phosphorothioate linkage
  modified_base 6: mod_base = OTHER; note = Nucleotide with phosphorothioate linkage
  modified_base 7: mod_base = OTHER; note = Thymine with phosphorothioate linkage
  modified_base 8: mod_base = OTHER; note = Nucleotide with phosphorothioate linkage
  modified_base 9: mod_base = OTHER; note = Nucleotide with phosphorothioate linkage
  modified_base 10: mod_base = OTHER; note = Nucleotide with phosphorothioate linkage
  modified_base 11: mod_base = OTHER; note = 8-amino-guanosine with phosphorothioate linkage
  modified_base 12: mod_base = OTHER; note = 5-methylcytosine with phosphorothioate linkage
  modified_base 13: mod_base = OTHER; note = Nucleotide with phosphorothioate linkage
  modified_base 14: mod_base = OTHER; note = Nucleotide with phosphorothioate linkage
  modified_base 15: mod_base = OTHER; note = Nucleotide with phosphorothioate linkage
  modified_base 16: mod_base = OTHER; note = Locked nucleic acid with phosphorothioate linkage
  modified_base 17: mod_base = OTHER; note = 2'-O-methoxyethyl modified thymine with phosphorothioate linkage
  modified_base 18: mod_base = OTHER; note = 2'-O-methoxyethyl modified nucleotide with phosphorothioate linkage
  modified_base 19: mod_base = OTHER; note = 2'-O-methoxyethyl 5-methylcytosine with phosphorothioate linkage
  modified_base 20: mod_base = OTHER; note = 2'-O-methoxyethyl modified nucleotide
  misc_feature 1..5: note = RNA
  misc_feature 6..15: note = DNA
  misc_feature 16..20: note = RNA
cagaggtgaagcgaagtgca

SEQ ID NO: 218 - DNA, 20 bp, synthetic construct
  source 1..20: mol_type = other DNA
  modified_base 1: mod_base = OTHER; note = 2'-O-methoxyethyl 5-methylcytosine with phosphorothioate linkage
  modified_base 2: mod_base = OTHER; note = 2'-O-methoxyethyl modified nucleotide with phosphorothioate linkage
  modified_base 3: mod_base = OTHER; note = Locked nucleic acid with phosphorothioate linkage
  modified_base 4: mod_base = OTHER; note = 2'-O-methoxyethyl modified nucleotide with phosphorothioate linkage
  modified_base 5: mod_base = OTHER; note = 2'-O-methoxyethyl modified nucleotide with phosphorothioate linkage
  modified_base 6: mod_base = OTHER; note = Nucleotide with phosphorothioate linkage
  modified_base 7: mod_base = OTHER; note = Thymine with phosphorothioate linkage
  modified_base 8: mod_base = OTHER; note = Nucleotide with phosphorothioate linkage
  modified_base 9: mod_base = OTHER; note = Nucleotide with phosphorothioate linkage
  modified_base 10: mod_base = OTHER; note = Nucleotide with phosphorothioate linkage
  modified_base 11: mod_base = OTHER; note = 8-amino-guanosine with phosphorothioate linkage
  modified_base 12: mod_base = OTHER; note = 5-methylcytosine with phosphorothioate linkage
  modified_base 13: mod_base = OTHER; note = Nucleotide with phosphorothioate linkage
  modified_base 14: mod_base = OTHER; note = Nucleotide with phosphorothioate linkage
  modified_base 15: mod_base = OTHER; note = Nucleotide with phosphorothioate linkage
  modified_base 16: mod_base = OTHER; note = 2'-O-methoxyethyl modified nucleotide with phosphorothioate linkage
  modified_base 17: mod_base = OTHER; note = 2'-O-methoxyethyl modified thymine with phosphorothioate linkage
  modified_base 18: mod_base = OTHER; note = Locked nucleic acid with phosphorothioate linkage
  modified_base 19: mod_base = OTHER; note = 2'-O-methoxyethyl 5-methylcytosine with phosphorothioate linkage
  modified_base 20: mod_base = OTHER; note = 2'-O-methoxyethyl modified nucleotide
  misc_feature 1..5: note = RNA
  misc_feature 6..15: note = DNA
  misc_feature 16..20: note = RNA
cagaggtgaagcgaagtgca

SEQ ID NO: 219 - DNA, 20 bp, synthetic construct
  source 1..20: mol_type = other DNA
  modified_base 1: mod_base = OTHER; note = 2'-O-methoxyethyl 5-methylcytosine with phosphorothioate linkage
  modified_base 2: mod_base = OTHER; note = 2'-O-methoxyethyl modified nucleotide with phosphorothioate linkage
  modified_base 3: mod_base = OTHER; note = 2'-O-methoxyethyl modified nucleotide with phosphorothioate linkage
  modified_base 4: mod_base = OTHER; note = 2'-O-methoxyethyl modified nucleotide with phosphorothioate linkage
  modified_base 5: mod_base = OTHER; note = Locked nucleic acid with phosphorothioate linkage
  modified_base 6: mod_base = OTHER; note = Nucleotide with phosphorothioate linkage
  modified_base 7: mod_base = OTHER; note = Thymine with phosphorothioate linkage
  modified_base 8: mod_base = OTHER; note = Nucleotide with phosphorothioate linkage
  modified_base 9: mod_base = OTHER; note = Nucleotide with phosphorothioate linkage
  modified_base 10: mod_base = OTHER; note = Nucleotide with phosphorothioate linkage
  modified_base 11: mod_base = OTHER; note = 8-amino-guanosine with phosphorothioate linkage
  modified_base 12: mod_base = OTHER; note = 5-methylcytosine with phosphorothioate linkage
  modified_base 13: mod_base = OTHER; note = Nucleotide with phosphorothioate linkage
  modified_base 14: mod_base = OTHER; note = Nucleotide with phosphorothioate linkage
  modified_base 15: mod_base = OTHER; note = Nucleotide with phosphorothioate linkage
  modified_base 16: mod_base = OTHER; note = Locked nucleic acid with phosphorothioate linkage
  modified_base 17: mod_base = OTHER; note = 2'-O-methoxyethyl modified thymine with phosphorothioate linkage
  modified_base 18: mod_base = OTHER; note = 2'-O-methoxyethyl modified nucleotide with phosphorothioate linkage
  modified_base 19: mod_base = OTHER; note = 2'-O-methoxyethyl 5-methylcytosine with phosphorothioate linkage
  modified_base 20: mod_base = OTHER; note = 2'-O-methoxyethyl modified nucleotide
  misc_feature 1..5: note = RNA
  misc_feature 6..15: note = DNA
  misc_feature 16..20: note = RNA
cagaggtgaagcgaagtgca

SEQ ID NO: 220 - DNA, 20 bp, synthetic construct
  source 1..20: mol_type = other DNA
  modified_base 1: mod_base = OTHER; note = 2'-O-methoxyethyl 5-methylcytosine with phosphorothioate linkage
  modified_base 2: mod_base = OTHER; note = 2'-O-methoxyethyl modified nucleotide with phosphorothioate linkage
  modified_base 3: mod_base = OTHER; note = 2'-O-methoxyethyl modified nucleotide with phosphorothioate linkage
  modified_base 4: mod_base = OTHER; note = 2'-O-methoxyethyl modified nucleotide with phosphorothioate linkage
  modified_base 5: mod_base = OTHER; note = Locked nucleic acid with phosphorothioate linkage
  modified_base 6: mod_base = OTHER; note = Nucleotide with phosphorothioate linkage
  modified_base 7: mod_base = OTHER; note = Thymine with phosphorothioate linkage
  modified_base 8: mod_base = OTHER; note = Nucleotide with phosphorothioate linkage
  modified_base 9: mod_base = OTHER; note = Nucleotide with phosphorothioate linkage
  modified_base 10: mod_base = OTHER; note = Nucleotide with phosphorothioate linkage
  modified_base 11: mod_base = OTHER; note = 8-amino-guanosine with phosphorothioate linkage
  modified_base 12: mod_base = OTHER; note = 5-methylcytosine with phosphorothioate linkage
  modified_base 13: mod_base = OTHER; note = Nucleotide with phosphorothioate linkage
  modified_base 14: mod_base = OTHER; note = Nucleotide with phosphorothioate linkage
  modified_base 15: mod_base = OTHER; note = Nucleotide with phosphorothioate linkage
  modified_base 16: mod_base = OTHER; note = 2'-O-methoxyethyl modified nucleotide with phosphorothioate linkage
  modified_base 17: mod_base = OTHER; note = 2'-O-methoxyethyl modified thymine with phosphorothioate linkage
  modified_base 18: mod_base = OTHER; note = Locked nucleic acid with phosphorothioate linkage
  modified_base 19: mod_base = OTHER; note = 2'-O-methoxyethyl 5-methylcytosine with phosphorothioate linkage
  modified_base 20: mod_base = OTHER; note = 2'-O-methoxyethyl modified nucleotide
  misc_feature 1..5: note = RNA
  misc_feature 6..15: note = DNA
  misc_feature 16..20: note = RNA
cagaggtgaagcgaagtgca

SEQ ID NO: 221 - DNA, 20 bp, synthetic construct
  source 1..20: mol_type = other DNA
  modified_base 1: mod_base = OTHER; note = 2'-O-methoxyethyl 5-methylcytosine with phosphorothioate linkage
  modified_base 2: mod_base = OTHER; note = Locked nucleic acid with phosphorothioate linkage
  modified_base 3: mod_base = OTHER; note = Locked nucleic acid with phosphorothioate linkage
  modified_base 4: mod_base = OTHER; note = 2'-O-methoxyethyl modified nucleotide with phosphorothioate linkage
  modified_base 5: mod_base = OTHER; note = Locked nucleic acid with phosphorothioate linkage
  modified_base 6: mod_base = OTHER; note = Nucleotide with phosphorothioate linkage
  modified_base 7: mod_base = OTHER; note = Thymine with phosphorothioate linkage
  modified_base 8: mod_base = OTHER; note = Nucleotide with phosphorothioate linkage
  modified_base 9: mod_base = OTHER; note = Nucleotide with phosphorothioate linkage
  modified_base 10: mod_base = OTHER; note = Nucleotide with phosphorothioate linkage
  modified_base 11: mod_base = OTHER; note = 8-amino-guanosine with phosphorothioate linkage
  modified_base 12: mod_base = OTHER; note = 5-methylcytosine with phosphorothioate linkage
  modified_base 13: mod_base = OTHER; note = Nucleotide with phosphorothioate linkage
  modified_base 14: mod_base = OTHER; note = Nucleotide with phosphorothioate linkage
  modified_base 15: mod_base = OTHER; note = Nucleotide with phosphorothioate linkage
  modified_base 16: mod_base = OTHER; note = 2'-O-methoxyethyl modified nucleotide with phosphorothioate linkage
  modified_base 17: mod_base = OTHER; note = 2'-O-methoxyethyl modified thymine with phosphorothioate linkage
  modified_base 18: mod_base = OTHER; note = 2'-O-methoxyethyl modified nucleotide with phosphorothioate linkage
  modified_base 19: mod_base = OTHER; note = 2'-O-methoxyethyl 5-methylcytosine with phosphorothioate linkage
  modified_base 20: mod_base = OTHER; note = 2'-O-methoxyethyl modified nucleotide
  misc_feature 1..5: note = RNA
  misc_feature 6..15: note = DNA
  misc_feature 16..20: note = RNA
cagaggtgaagcgaagtgca

SEQ ID NO: 222 - DNA, 20 bp, synthetic construct
  source 1..20: mol_type = other DNA
  modified_base 1: mod_base = OTHER; note = 2'-O-methoxyethyl 5-methylcytosine with phosphorothioate linkage
  modified_base 2: mod_base = OTHER; note = Locked nucleic acid with phosphorothioate linkage
  modified_base 3: mod_base = OTHER; note = 2'-O-methoxyethyl modified nucleotide with phosphorothioate linkage
  modified_base 4: mod_base = OTHER; note = Locked nucleic acid with phosphorothioate linkage
  modified_base 5: mod_base = OTHER; note = Locked nucleic acid with phosphorothioate linkage
  modified_base 6: mod_base = OTHER; note = Nucleotide with phosphorothioate linkage
  modified_base 7: mod_base = OTHER; note = Thymine with phosphorothioate linkage
  modified_base 8: mod_base = OTHER; note = Nucleotide with phosphorothioate linkage
  modified_base 9: mod_base = OTHER; note = Nucleotide with phosphorothioate linkage
  modified_base 10: mod_base = OTHER; note = Nucleotide with phosphorothioate linkage
  modified_base 11: mod_base = OTHER; note = 8-amino-guanosine with phosphorothioate linkage
  modified_base 12: mod_base = OTHER; note = 5-methylcytosine with phosphorothioate linkage
  modified_base 13: mod_base = OTHER; note = Nucleotide with phosphorothioate linkage
  modified_base 14: mod_base = OTHER; note = Nucleotide with phosphorothioate linkage
  modified_base 15: mod_base = OTHER; note = Nucleotide with phosphorothioate linkage
  modified_base 16: mod_base = OTHER; note = 2'-O-methoxyethyl modified nucleotide with phosphorothioate linkage
  modified_base 17: mod_base = OTHER; note = 2'-O-methoxyethyl modified thymine with phosphorothioate linkage
  modified_base 18: mod_base = OTHER; note = 2'-O-methoxyethyl modified nucleotide with phosphorothioate linkage
  modified_base 19: mod_base = OTHER; note = 2'-O-methoxyethyl 5-methylcytosine with phosphorothioate linkage
  modified_base 20: mod_base = OTHER; note = 2'-O-methoxyethyl modified nucleotide
  misc_feature 1..5: note = RNA
  misc_feature 6..15: note = DNA
  misc_feature 16..20: note = RNA
cagaggtgaagcgaagtgca

SEQ ID NO: 223 - DNA, 20 bp, synthetic construct
  source 1..20: mol_type = other DNA
  modified_base 1: mod_base = OTHER; note = 2'-O-methoxyethyl 5-methylcytosine with phosphorothioate linkage
  modified_base 2: mod_base = OTHER; note = 2'-O-methoxyethyl modified nucleotide with phosphorothioate linkage
  modified_base 3: mod_base = OTHER; note = 2'-O-methoxyethyl modified nucleotide with phosphorothioate linkage
  modified_base 4: mod_base = OTHER; note = 2'-O-methoxyethyl modified nucleotide with phosphorothioate linkage
  modified_base 5: mod_base = OTHER; note = 2'-O-methoxyethyl modified nucleotide with phosphorothioate linkage
  modified_base 6: mod_base = OTHER; note = Nucleotide with phosphorothioate linkage
  modified_base 7: mod_base = OTHER; note = Thymine with phosphorothioate linkage
  modified_base 8: mod_base = OTHER; note = Nucleotide with phosphorothioate linkage
  modified_base 9: mod_base = OTHER; note = Nucleotide with phosphorothioate linkage
  modified_base 10: mod_base = OTHER; note = Nucleotide with phosphorothioate linkage
  modified_base 11: mod_base = OTHER; note = 8-amino-guanosine with phosphorothioate linkage
  modified_base 12: mod_base = OTHER; note = 5-methylcytosine with phosphorothioate linkage
  modified_base 13: mod_base = OTHER; note = Nucleotide with phosphorothioate linkage
  modified_base 14: mod_base = OTHER; note = Nucleotide with phosphorothioate linkage
  modified_base 15: mod_base = OTHER; note = Nucleotide with phosphorothioate linkage
  modified_base 16: mod_base = OTHER; note = Locked nucleic acid with phosphorothioate linkage
  modified_base 17: mod_base = OTHER; note = 2'-O-methoxyethyl modified thymine with phosphorothioate linkage
  modified_base 18: mod_base = OTHER; note = Locked nucleic acid with phosphorothioate linkage
  modified_base 19: mod_base = OTHER; note = 2'-O-methoxyethyl 5-methylcytosine with phosphorothioate linkage
  modified_base 20: mod_base = OTHER; note = Locked nucleic acid
  misc_feature 1..5: note = RNA
  misc_feature 6..15: note = DNA
  misc_feature 16..20: note = RNA
cagaggtgaagcgaagtgca

SEQ ID NO: 224 - DNA, 20 bp, synthetic construct
  source 1..20: mol_type = other DNA
  modified_base 1: mod_base = OTHER; note = 2'-O-methoxyethyl 5-methylcytosine with phosphorothioate linkage
  modified_base 2: mod_base = OTHER; note = Locked nucleic acid with phosphorothioate linkage
  modified_base 3: mod_base = OTHER; note = Locked nucleic acid with phosphorothioate linkage
  modified_base 4: mod_base = OTHER; note = 2'-O-methoxyethyl modified nucleotide with phosphorothioate linkage
  modified_base 5: mod_base = OTHER; note = Locked nucleic acid with phosphorothioate linkage
  modified_base 6: mod_base = OTHER; note = Nucleotide with phosphorothioate linkage
  modified_base 7: mod_base = OTHER; note = Thymine with phosphorothioate linkage
  modified_base 8: mod_base = OTHER; note = Nucleotide with phosphorothioate linkage
  modified_base 9: mod_base = OTHER; note = Nucleotide with phosphorothioate linkage
  modified_base 10: mod_base = OTHER; note = Nucleotide with phosphorothioate linkage
  modified_base 11: mod_base = OTHER; note = Nucleotide with phosphorothioate linkage
  modified_base 12: mod_base = OTHER; note = 5-methylcytosine with phosphorothioate linkage
  modified_base 13: mod_base = OTHER; note = Nucleotide with phosphorothioate linkage
  modified_base 14: mod_base = OTHER; note = Nucleotide with phosphorothioate linkage
  modified_base 15: mod_base = OTHER; note = Nucleotide with phosphorothioate linkage
  modified_base 16: mod_base = OTHER; note = 2'-O-methoxyethyl modified nucleotide with phosphorothioate linkage
  modified_base 17: mod_base = OTHER; note = 2'-O-methoxyethyl modified thymine with phosphorothioate linkage
  modified_base 18: mod_base = OTHER; note = 2'-O-methoxyethyl modified nucleotide with phosphorothioate linkage
  modified_base 19: mod_base = OTHER; note = 2'-O-methoxyethyl 5-methylcytosine with phosphorothioate linkage
  modified_base 20: mod_base = OTHER; note = 2'-O-methoxyethyl modified nucleotide
  misc_feature 1..5: note = RNA
  misc_feature 6..15: note = DNA
  misc_feature 16..20: note = RNA
cagaggtgaagcgaagtgca

SEQ ID NO: 225 - DNA, 20 bp, synthetic construct
  source 1..20: mol_type = other DNA
  modified_base 1: mod_base = OTHER; note = 2'-O-methoxyethyl 5-methylcytosine with phosphorothioate linkage
  modified_base 2: mod_base = OTHER; note = Locked nucleic acid with phosphorothioate linkage
  modified_base 3: mod_base = OTHER; note = 2'-O-methoxyethyl modified nucleotide with phosphorothioate linkage
  modified_base 4: mod_base = OTHER; note = Locked nucleic acid with phosphorothioate linkage
  modified_base 5: mod_base = OTHER; note = Locked nucleic acid with phosphorothioate linkage
  modified_base 6: mod_base = OTHER; note = Nucleotide with phosphorothioate linkage
  modified_base 7: mod_base = OTHER; note = Thymine with phosphorothioate linkage
  modified_base 8: mod_base = OTHER; note = Nucleotide with phosphorothioate linkage
  modified_base 9: mod_base = OTHER; note = Nucleotide with phosphorothioate linkage
  modified_base 10: mod_base = OTHER; note = Nucleotide with phosphorothioate linkage
  modified_base 11: mod_base = OTHER; note = Nucleotide with phosphorothioate linkage
  modified_base 12: mod_base = OTHER; note = 5-methylcytosine with phosphorothioate linkage
  modified_base 13: mod_base = OTHER; note = Nucleotide with phosphorothioate linkage
  modified_base 14: mod_base = OTHER; note = Nucleotide with phosphorothioate linkage
  modified_base 15: mod_base = OTHER; note = Nucleotide with phosphorothioate linkage
  modified_base 16: mod_base = OTHER; note = 2'-O-methoxyethyl modified nucleotide with phosphorothioate linkage
  modified_base 17: mod_base = OTHER; note = 2'-O-methoxyethyl modified thymine with phosphorothioate linkage
  modified_base 18: mod_base = OTHER; note = 2'-O-methoxyethyl modified nucleotide with phosphorothioate linkage
  modified_base 19: mod_base = OTHER; note = 2'-O-methoxyethyl 5-methylcytosine with phosphorothioate linkage
  modified_base 20: mod_base = OTHER; note = 2'-O-methoxyethyl modified nucleotide
  misc_feature 1..5: note = RNA
  misc_feature 6..15: note = DNA
  misc_feature 16..20: note = RNA
cagaggtgaagcgaagtgca

SEQ ID NO: 226 - DNA, 20 bp, synthetic construct
  source 1..20: mol_type = other DNA
  modified_base 1: mod_base = OTHER; note = 2'-O-methoxyethyl 5-methylcytosine with phosphorothioate linkage
  modified_base 2: mod_base = OTHER; note = 2'-O-methoxyethyl modified nucleotide with phosphorothioate linkage
  modified_base 3: mod_base = OTHER; note = 2'-O-methoxyethyl modified nucleotide with phosphorothioate linkage
  modified_base 4: mod_base = OTHER; note = 2'-O-methoxyethyl modified nucleotide with phosphorothioate linkage
  modified_base 5: mod_base = OTHER; note = 2'-O-methoxyethyl modified nucleotide with phosphorothioate linkage
  modified_base 6: mod_base = OTHER; note = Nucleotide with phosphorothioate linkage
  modified_base 7: mod_base = OTHER; note = Thymine with phosphorothioate linkage
  modified_base 8: mod_base = OTHER; note = Nucleotide with phosphorothioate linkage
  modified_base 9: mod_base = OTHER; note = Nucleotide with phosphorothioate linkage
  modified_base 10: mod_base = OTHER; note = Nucleotide with phosphorothioate linkage
  modified_base 11: mod_base = OTHER; note = Nucleotide with phosphorothioate linkage
  modified_base 12: mod_base = OTHER; note = 5-methylcytosine with phosphorothioate linkage
  modified_base 13: mod_base = OTHER; note = Nucleotide with phosphorothioate linkage
  modified_base 14: mod_base = OTHER; note = Nucleotide with phosphorothioate linkage
  modified_base 15: mod_base = OTHER; note = Nucleotide with phosphorothioate linkage
  modified_base 16: mod_base = OTHER; note = Locked nucleic acid with phosphorothioate linkage
  modified_base 17: mod_base = OTHER; note = 2'-O-methoxyethyl modified thymine with phosphorothioate linkage
  modified_base 18: mod_base = OTHER; note = Locked nucleic acid with phosphorothioate linkage
  modified_base 19: mod_base = OTHER; note = 2'-O-methoxyethyl 5-methylcytosine with phosphorothioate linkage
  modified_base 20: mod_base = OTHER; note = Locked nucleic acid
  misc_feature 1..5: note = RNA
  misc_feature 6..15: note = DNA
  misc_feature 16..20: note = RNA
cagaggtgaagcgaagtgca

SEQ ID NO: 227 - DNA, 20 bp, synthetic construct
  source 1..20: mol_type = other DNA
  modified_base 1: mod_base = OTHER; note = 2'-O-methoxyethyl modified nucleotide with phosphorothioate linkage
  modified_base 2: mod_base = OTHER; note = 2'-O-methoxyethyl 5-methylcytosine with phosphorothioate linkage
  modified_base 3: mod_base = OTHER; note = 2'-O-methoxyethyl modified nucleotide with phosphorothioate linkage
  modified_base 4: mod_base = OTHER; note = 2'-O-methoxyethyl modified nucleotide with phosphorothioate linkage
  modified_base 5: mod_base = OTHER; note = Nucleotide with phosphorothioate linkage
  modified_base 6: mod_base = OTHER; note = Nucleotide with phosphorothioate linkage
  modified_base 7: mod_base = OTHER; note = Nucleotide with phosphorothioate linkage
  modified_base 8: mod_base = OTHER; note = Thymine with phosphorothioate linkage
  modified_base 9: mod_base = OTHER; note = Nucleotide with phosphorothioate linkage
  modified_base 10: mod_base = OTHER; note = 2'-O-methyl modified abasic nucleotide with phosphorothioate linkage
  modified_base 11: mod_base = OTHER; note = Nucleotide with phosphorothioate linkage
  modified_base 12: mod_base = OTHER; note = Nucleotide with phosphorothioate linkage
  modified_base 13: mod_base = OTHER; note = 5-methylcytosine with phosphorothioate linkage
  modified_base 14: mod_base = OTHER; note = Nucleotide with phosphorothioate linkage
  modified_base 15: mod_base = OTHER; note = Nucleotide with phosphorothioate linkage
  modified_base 16: mod_base = OTHER; note = 2'-O-methoxyethyl modified nucleotide with phosphorothioate linkage
  modified_base 17: mod_base = OTHER; note = Locked nucleic acid with phosphorothioate linkage
  modified_base 18: mod_base = OTHER; note = 2'-O-methoxyethyl modified thymine with phosphorothioate linkage
  modified_base 19: mod_base = OTHER; note = Locked nucleic acid with phosphorothioate linkage
  modified_base 20: mod_base = OTHER; note = Locked 5-methylcytosine
  misc_feature 1..4: note = RNA
  misc_feature 5..9: note = DNA
  misc_feature 10: note = RNA
  misc_feature 11..15: note = DNA
  misc_feature 16..20: note = RNA
gcagaggtgnagcgaagtgc

SEQ ID NO: 228 - DNA, 20 bp, synthetic construct
  source 1..20: mol_type = other DNA
  modified_base 1: mod_base = OTHER; note = 2'-O-methoxyethyl 5-methylcytosine with phosphorothioate linkage
  modified_base 2: mod_base = OTHER; note = 2'-O-methoxyethyl modified nucleotide with phosphorothioate linkage
  modified_base 3: mod_base = OTHER; note = 2'-O-methoxyethyl modified nucleotide with phosphorothioate linkage
  modified_base 4: mod_base = OTHER; note = 2'-O-methoxyethyl modified nucleotide with phosphorothioate linkage
  modified_base 5: mod_base = OTHER; note = 2'-O-methoxyethyl modified nucleotide with phosphorothioate linkage
  modified_base 6: mod_base = OTHER; note = Nucleotide with R-stereo-defined phosphorothioate linkage
  modified_base 7: mod_base = OTHER; note = Thymine with phosphorothioate linkage
  modified_base 8: mod_base = OTHER; note = Nucleotide with phosphorothioate linkage
  modified_base 9: mod_base = OTHER; note = Nucleotide with phosphorothioate linkage
  modified_base 10: mod_base = OTHER; note = Nucleotide with phosphorothioate linkage
  modified_base 11: mod_base = OTHER; note = Nucleotide with phosphorothioate linkage
  modified_base 12: mod_base = OTHER; note = 5-methylcytosine with phosphorothioate linkage
  modified_base 13: mod_base = OTHER; note = Nucleotide with phosphorothioate linkage
  modified_base 14: mod_base = OTHER; note = Nucleotide with phosphorothioate linkage
  modified_base 15: mod_base = OTHER; note = Nucleotide with phosphorothioate linkage
  modified_base 16: mod_base = OTHER; note = 2'-O-methoxyethyl modified nucleotide with phosphorothioate linkage
  modified_base 17: mod_base = OTHER; note = 2'-O-methoxyethyl modified thymine with phosphorothioate linkage
  modified_base 18: mod_base = OTHER; note = 2'-O-methoxyethyl modified nucleotide with phosphorothioate linkage
  modified_base 19: mod_base = OTHER; note = 2'-O-methoxyethyl 5-methylcytosine with phosphorothioate linkage
  modified_base 20: mod_base = OTHER; note = 2'-O-methoxyethyl modified nucleotide
  misc_feature 1..5: note = RNA
  misc_feature 6..15: note = DNA
  misc_feature 16..20: note = RNA
cagaggtgaagcgaagtgca

SEQ ID NO: 229 - DNA, 20 bp, synthetic construct
  source 1..20: mol_type = other DNA
  modified_base 1: mod_base = OTHER; note = 2'-O-methoxyethyl 5-methylcytosine with phosphorothioate linkage
  modified_base 2: mod_base = OTHER; note = 2'-O-methoxyethyl modified nucleotide with phosphorothioate linkage
  modified_base 3: mod_base = OTHER; note = 2'-O-methoxyethyl modified nucleotide with phosphorothioate linkage
  modified_base 4: mod_base = OTHER; note = 2'-O-methoxyethyl modified nucleotide with phosphorothioate linkage
  modified_base 5: mod_base = OTHER; note = 2'-O-methoxyethyl modified nucleotide with phosphorothioate linkage
  modified_base 6: mod_base = OTHER; note = Nucleotide with phosphorothioate linkage
  modified_base 7: mod_base = OTHER; note = Thymine with R-stereo-defined phosphorothioate linkage
  modified_base 8: mod_base = OTHER; note = Nucleotide with phosphorothioate linkage
  modified_base 9: mod_base = OTHER; note = Nucleotide with phosphorothioate linkage
  modified_base 10: mod_base = OTHER; note = Nucleotide with phosphorothioate linkage
  modified_base 11: mod_base = OTHER; note = Nucleotide with phosphorothioate linkage
  modified_base 12: mod_base = OTHER; note = 5-methylcytosine with phosphorothioate linkage
  modified_base 13: mod_base = OTHER; note = Nucleotide with phosphorothioate linkage
  modified_base 14: mod_base = OTHER; note = Nucleotide with phosphorothioate linkage
  modified_base 15: mod_base = OTHER; note = Nucleotide with phosphorothioate linkage
  modified_base 16: mod_base = OTHER; note = 2'-O-methoxyethyl modified nucleotide with phosphorothioate linkage
  modified_base 17: mod_base = OTHER; note = 2'-O-methoxyethyl modified thymine with phosphorothioate linkage
  modified_base 18: mod_base = OTHER; note = 2'-O-methoxyethyl modified nucleotide with phosphorothioate linkage
  modified_base 19: mod_base = OTHER; note = 2'-O-methoxyethyl 5-methylcytosine with phosphorothioate linkage
  modified_base 20: mod_base = OTHER; note = 2'-O-methoxyethyl modified nucleotide
  misc_feature 1..5: note = RNA
  misc_feature 6..15: note = DNA
  misc_feature 16..20: note = RNA
cagaggtgaagcgaagtgca

SEQ ID NO: 230 - DNA, 20 bp, synthetic construct
  source 1..20: mol_type = other DNA
  modified_base 1: mod_base = OTHER; note = 2'-O-methoxyethyl 5-methylcytosine with phosphorothioate linkage
  modified_base 2: mod_base = OTHER; note = 2'-O-methoxyethyl modified nucleotide with phosphorothioate linkage
  modified_base 3: mod_base = OTHER; note = 2'-O-methoxyethyl modified nucleotide with phosphorothioate linkage
  modified_base 4: mod_base = OTHER; note = 2'-O-methoxyethyl modified nucleotide with phosphorothioate linkage
  modified_base 5: mod_base = OTHER; note = 2'-O-methoxyethyl modified nucleotide with phosphorothioate linkage
  modified_base 6: mod_base = OTHER; note = Nucleotide with phosphorothioate linkage
  modified_base 7: mod_base = OTHER; note = Thymine with phosphorothioate linkage
  modified_base 8: mod_base = OTHER; note = Nucleotide with R-stereo-defined phosphorothioate linkage
  modified_base 9: mod_base = OTHER; note = Nucleotide with phosphorothioate linkage
  modified_base 10: mod_base = OTHER; note = Nucleotide with phosphorothioate linkage
  modified_base 11: mod_base = OTHER; note = Nucleotide with phosphorothioate linkage
  modified_base 12: mod_base = OTHER; note = 5-methylcytosine with phosphorothioate linkage
  modified_base 13: mod_base = OTHER; note = Nucleotide with phosphorothioate linkage
  modified_base 14: mod_base = OTHER; note = Nucleotide with phosphorothioate linkage
  modified_base 15: mod_base = OTHER; note = Nucleotide with phosphorothioate linkage
  modified_base 16: mod_base = OTHER; note = 2'-O-methoxyethyl modified nucleotide with phosphorothioate linkage
  modified_base 17: mod_base = OTHER; note = 2'-O-methoxyethyl modified thymine with phosphorothioate linkage
  modified_base 18: mod_base = OTHER; note = 2'-O-methoxyethyl modified nucleotide with phosphorothioate linkage
  modified_base 19: mod_base = OTHER; note = 2'-O-methoxyethyl 5-methylcytosine with phosphorothioate linkage
  modified_base 20: mod_base = OTHER; note = 2'-O-methoxyethyl modified nucleotide
  misc_feature 1..5: note = RNA
  misc_feature 6..15: note = DNA
  misc_feature 16..20: note = RNA
cagaggtgaagcgaagtgca

SEQ ID NO: 231 - DNA, 20 bp, synthetic construct
  source 1..20: mol_type = other DNA
  modified_base 1: mod_base = OTHER; note = 2'-O-methoxyethyl 5-methylcytosine with phosphorothioate linkage
  modified_base 2: mod_base = OTHER; note = 2'-O-methoxyethyl modified nucleotide with phosphorothioate linkage
  modified_base 3: mod_base = OTHER; note = 2'-O-methoxyethyl modified nucleotide with phosphorothioate linkage
  modified_base 4: mod_base = OTHER; note = 2'-O-methoxyethyl modified nucleotide with phosphorothioate linkage
  modified_base 5: mod_base = OTHER; note = 2'-O-methoxyethyl modified nucleotide with phosphorothioate linkage
  modified_base 6: mod_base = OTHER; note = Nucleotide with phosphorothioate linkage
  modified_base 7: mod_base = OTHER; note = Thymine with phosphorothioate linkage
  modified_base 8: mod_base = OTHER; note = Nucleotide with phosphorothioate linkage
  modified_base 9: mod_base = OTHER; note = Nucleotide with R-stereo-defined phosphorothioate linkage
  modified_base 10: mod_base = OTHER; note = Nucleotide with phosphorothioate linkage
  modified_base 11: mod_base = OTHER; note = Nucleotide with phosphorothioate linkage
  modified_base 12: mod_base = OTHER; note = 5-methylcytosine with phosphorothioate linkage
  modified_base 13: mod_base = OTHER; note = Nucleotide with phosphorothioate linkage
  modified_base 14: mod_base = OTHER; note = Nucleotide with phosphorothioate linkage
  modified_base 15: mod_base = OTHER; note = Nucleotide with phosphorothioate linkage
  modified_base 16: mod_base = OTHER; note = 2'-O-methoxyethyl modified nucleotide with phosphorothioate linkage
  modified_base 17: mod_base = OTHER; note = 2'-O-methoxyethyl modified thymine with phosphorothioate linkage
  modified_base 18: mod_base = OTHER; note = 2'-O-methoxyethyl modified nucleotide with phosphorothioate linkage
  modified_base 19: mod_base = OTHER; note = 2'-O-methoxyethyl 5-methylcytosine with phosphorothioate linkage
  modified_base 20: mod_base = OTHER; note = 2'-O-methoxyethyl modified nucleotide
  misc_feature 1..5: note = RNA
  misc_feature 6..15: note = DNA
  misc_feature 16..20: note = RNA
cagaggtgaagcgaagtgca

SEQ ID NO: 232 - DNA, 20 bp, synthetic construct
  source 1..20: mol_type = other DNA
  modified_base 1: mod_base = OTHER; note = 2'-O-methoxyethyl 5-methylcytosine with phosphorothioate linkage
  modified_base 2: mod_base = OTHER; note = 2'-O-methoxyethyl modified nucleotide with phosphorothioate linkage
  modified_base 3: mod_base = OTHER; note = 2'-O-methoxyethyl modified nucleotide with phosphorothioate linkage
  modified_base 4: mod_base = OTHER; note = 2'-O-methoxyethyl modified nucleotide with phosphorothioate linkage
  modified_base 5: mod_base = OTHER; note = 2'-O-methoxyethyl modified nucleotide with phosphorothioate linkage
  modified_base 6: mod_base = OTHER; note = Nucleotide with phosphorothioate linkage
  modified_base 7: mod_base = OTHER; note = Thymine with phosphorothioate linkage
  modified_base 8: mod_base = OTHER; note = Nucleotide with phosphorothioate linkage
  modified_base 9: mod_base = OTHER; note = Nucleotide with phosphorothioate linkage
  modified_base 10: mod_base = OTHER; note = Nucleotide with R-stereo-defined phosphorothioate linkage
  modified_base 11: mod_base = OTHER; note = Nucleotide with phosphorothioate linkage
  modified_base 12: mod_base = OTHER; note = 5-methylcytosine with phosphorothioate linkage
  modified_base 13: mod_base = OTHER; note = Nucleotide with phosphorothioate linkage
  modified_base 14: mod_base = OTHER; note = Nucleotide with phosphorothioate linkage
  modified_base 15: mod_base = OTHER; note = Nucleotide with phosphorothioate linkage
  modified_base 16: mod_base = OTHER; note = 2'-O-methoxyethyl modified nucleotide with phosphorothioate linkage
  modified_base 17: mod_base = OTHER; note = 2'-O-methoxyethyl modified thymine with phosphorothioate linkage
  modified_base 18: mod_base = OTHER; note = 2'-O-methoxyethyl modified nucleotide with phosphorothioate linkage
  modified_base 19: mod_base = OTHER; note = 2'-O-methoxyethyl 5-methylcytosine with phosphorothioate linkage
  modified_base 20: mod_base = OTHER; note = 2'-O-methoxyethyl modified nucleotide
  misc_feature 1..5: note = RNA
  misc_feature 6..15: note = DNA
  misc_feature 16..20: note = RNA
cagaggtgaagcgaagtgca

SEQ ID NO: 233 - DNA, 20 bp, synthetic construct
  source 1..20: mol_type = other DNA
  modified_base 1: mod_base = OTHER; note = 2'-O-methoxyethyl 5-methylcytosine with phosphorothioate linkage
  modified_base 2: mod_base = OTHER; note = 2'-O-methoxyethyl modified nucleotide with phosphorothioate linkage
  modified_base 3: mod_base = OTHER; note = 2'-O-methoxyethyl modified nucleotide with phosphorothioate linkage
  modified_base 4: mod_base = OTHER; note = 2'-O-methoxyethyl modified nucleotide with phosphorothioate linkage
  modified_base 5: mod_base = OTHER; note = 2'-O-methoxyethyl modified nucleotide with phosphorothioate linkage
  modified_base 6: mod_base = OTHER; note = Nucleotide with phosphorothioate linkage
  modified_base 7: mod_base = OTHER; note = Thymine with phosphorothioate linkage
  modified_base 8: mod_base = OTHER; note = Nucleotide with phosphorothioate linkage
  modified_base 9: mod_base = OTHER; note = Nucleotide with phosphorothioate linkage
  modified_base 10: mod_base = OTHER; note = Nucleotide with phosphorothioate linkage
  modified_base 11: mod_base = OTHER; note = Nucleotide with R-stereo-defined phosphorothioate linkage
  modified_base 12: mod_base = OTHER; note = 5-methylcytosine with phosphorothioate linkage
  modified_base 13: mod_base = OTHER; note = Nucleotide with phosphorothioate linkage
  modified_base 14: mod_base = OTHER; note = Nucleotide with phosphorothioate linkage
  modified_base 15: mod_base = OTHER; note = Nucleotide with phosphorothioate linkage
  modified_base 16: mod_base = OTHER; note = 2'-O-methoxyethyl modified nucleotide with phosphorothioate linkage
  modified_base 17: mod_base = OTHER; note = 2'-O-methoxyethyl modified thymine with phosphorothioate linkage
  modified_base 18: mod_base = OTHER; note = 2'-O-methoxyethyl modified nucleotide with phosphorothioate linkage
  modified_base 19: mod_base = OTHER; note = 2'-O-methoxyethyl 5-methylcytosine with phosphorothioate linkage
  modified_base 20: mod_base = OTHER; note = 2'-O-methoxyethyl modified nucleotide
  misc_feature 1..5: note = RNA
  misc_feature 6..15: note = DNA
  misc_feature 16..20: note = RNA
cagaggtgaagcgaagtgca

SEQ ID NO: 234 - DNA, 20 bp, synthetic construct
  source 1..20: mol_type = other DNA
  modified_base 1: mod_base = OTHER; note = 2'-O-methoxyethyl 5-methylcytosine with phosphorothioate linkage
  modified_base 2: mod_base = OTHER; note = 2'-O-methoxyethyl modified nucleotide with phosphorothioate linkage
  modified_base 3: mod_base = OTHER; note = 2'-O-methoxyethyl modified nucleotide with phosphorothioate linkage
  modified_base 4: mod_base = OTHER; note = 2'-O-methoxyethyl modified nucleotide with phosphorothioate linkage
  modified_base 5: mod_base = OTHER; note = 2'-O-methoxyethyl modified nucleotide with phosphorothioate linkage
  modified_base 6: mod_base = OTHER; note = Nucleotide with phosphorothioate linkage
  modified_base 7: mod_base = OTHER; note = Thymine with phosphorothioate linkage
  modified_base 8: mod_base = OTHER; note = Nucleotide with phosphorothioate linkage
  modified_base 9: mod_base = OTHER; note = Nucleotide with phosphorothioate linkage
  modified_base 10: mod_base = OTHER; note = Nucleotide with phosphorothioate linkage
  modified_base 11: mod_base = OTHER; note = Nucleotide with phosphorothioate linkage
  modified_base 12: mod_base = OTHER; note = 5-methylcytosine with R-stereo-defined phosphorothioate linkage
  modified_base 13: mod_base = OTHER; note = Nucleotide with phosphorothioate linkage
  modified_base 14: mod_base = OTHER; note = Nucleotide with phosphorothioate linkage
  modified_base 15: mod_base = OTHER; note = Nucleotide with phosphorothioate linkage
  modified_base 16: mod_base = OTHER; note = 2'-O-methoxyethyl modified nucleotide with phosphorothioate linkage
  modified_base 17: mod_base = OTHER; note = 2'-O-methoxyethyl modified thymine with phosphorothioate linkage
  modified_base 18: mod_base = OTHER; note = 2'-O-methoxyethyl modified nucleotide with phosphorothioate linkage
  modified_base 19: mod_base = OTHER; note = 2'-O-methoxyethyl 5-methylcytosine with phosphorothioate linkage
  modified_base 20: mod_base = OTHER; note = 2'-O-methoxyethyl modified nucleotide
  misc_feature 1..5: note = RNA
  misc_feature 6..15: note = DNA
  misc_feature 16..20: note = RNA
cagaggtgaagcgaagtgca

SEQ ID NO: 235 - DNA, 20 bp, synthetic construct
  source 1..20: mol_type = other DNA
  modified_base 1: mod_base = OTHER; note = 2'-O-methoxyethyl 5-methylcytosine with phosphorothioate linkage
  modified_base 2: mod_base = OTHER; note = 2'-O-methoxyethyl modified nucleotide with phosphorothioate linkage
  modified_base 3: mod_base = OTHER; note = 2'-O-methoxyethyl modified nucleotide with phosphorothioate linkage
  modified_base 4: mod_base = OTHER; note = 2'-O-methoxyethyl modified nucleotide with phosphorothioate linkage
  modified_base 5: mod_base = OTHER; note = 2'-O-methoxyethyl modified nucleotide with phosphorothioate linkage
  modified_base 6: mod_base = OTHER; note = Nucleotide with phosphorothioate linkage
  modified_base 7: mod_base = OTHER; note = Thymine with phosphorothioate linkage
  modified_base 8: mod_base = OTHER; note = Nucleotide with phosphorothioate linkage
  modified_base 9: mod_base = OTHER; note = Nucleotide with phosphorothioate linkage
  modified_base 10: mod_base = OTHER; note = Nucleotide with phosphorothioate linkage
  modified_base 11: mod_base = OTHER; note = Nucleotide with phosphorothioate linkage
  modified_base 12: mod_base = OTHER; note = 5-methylcytosine with phosphorothioate linkage
  modified_base 13: mod_base = OTHER; note = Nucleotide with R-stereo-defined phosphorothioate linkage
  modified_base 14: mod_base = OTHER; note = Nucleotide with phosphorothioate linkage
  modified_base 15: mod_base = OTHER; note = Nucleotide with phosphorothioate linkage
  modified_base 16: mod_base = OTHER; note = 2'-O-methoxyethyl modified nucleotide with phosphorothioate linkage
  modified_base 17: mod_base = OTHER; note = 2'-O-methoxyethyl modified thymine with phosphorothioate linkage
  modified_base 18: mod_base = OTHER; note = 2'-O-methoxyethyl modified nucleotide with phosphorothioate linkage
  modified_base 19: mod_base = OTHER; note = 2'-O-methoxyethyl 5-methylcytosine with phosphorothioate linkage
  modified_base 20: mod_base = OTHER; note = 2'-O-methoxyethyl modified nucleotide
  misc_feature 1..5: note = RNA
  misc_feature 6..15: note = DNA
  misc_feature 16..20: note = RNA
cagaggtgaagcgaagtgca

SEQ ID NO: 236 - DNA, 20 bp, synthetic construct
  source 1..20: mol_type = other DNA
  modified_base 1: mod_base = OTHER; note = 2'-O-methoxyethyl 5-methylcytosine with phosphorothioate linkage
  modified_base 2: mod_base = OTHER; note = 2'-O-methoxyethyl modified nucleotide with phosphorothioate linkage
  modified_base 3: mod_base = OTHER; note = 2'-O-methoxyethyl modified nucleotide with phosphorothioate linkage
  modified_base 4: mod_base = OTHER; note = 2'-O-methoxyethyl modified nucleotide with phosphorothioate linkage
  modified_base 5: mod_base = OTHER; note = 2'-O-methoxyethyl modified nucleotide with phosphorothioate linkage
  modified_base 6: mod_base = OTHER; note = Nucleotide with phosphorothioate linkage
  modified_base 7: mod_base = OTHER; note = Thymine with phosphorothioate linkage
  modified_base 8: mod_base = OTHER; note = Nucleotide with phosphorothioate linkage
  modified_base 9: mod_base = OTHER; note = Nucleotide with phosphorothioate linkage
  modified_base 10: mod_base = OTHER; note = Nucleotide with phosphorothioate linkage
  modified_base 11: mod_base = OTHER; note = Nucleotide with phosphorothioate linkage
  modified_base 12: mod_base = OTHER; note = 5-methylcytosine with phosphorothioate linkage
  modified_base 13: mod_base = OTHER; note = Nucleotide with phosphorothioate linkage
  modified_base 14: mod_base = OTHER; note = Nucleotide with R-stereo-defined phosphorothioate linkage
  modified_base 15: mod_base = OTHER; note = Nucleotide with phosphorothioate linkage
  modified_base 16: mod_base = OTHER; note = 2'-O-methoxyethyl modified nucleotide with phosphorothioate linkage
  modified_base 17: mod_base = OTHER; note = 2'-O-methoxyethyl modified thymine with phosphorothioate linkage
  modified_base 18: mod_base = OTHER; note = 2'-O-methoxyethyl modified nucleotide with phosphorothioate linkage
  modified_base 19: mod_base = OTHER; note = 2'-O-methoxyethyl 5-methylcytosine with phosphorothioate linkage
  modified_base 20: mod_base = OTHER; note = 2'-O-methoxyethyl modified nucleotide
  misc_feature 1..5: note = RNA
  misc_feature 6..15: note = DNA
  misc_feature 16..20: note = RNA
cagaggtgaagcgaagtgca

SEQ ID NO: 237 - DNA, 20 bp, synthetic construct
  source 1..20: mol_type = other DNA
  modified_base 1: mod_base = OTHER; note = 2'-O-methoxyethyl 5-methylcytosine with phosphorothioate linkage
  modified_base 2: mod_base = OTHER; note = 2'-O-methoxyethyl modified nucleotide with phosphorothioate linkage
  modified_base 3: mod_base = OTHER; note = 2'-O-methoxyethyl modified nucleotide with phosphorothioate linkage
  modified_base 4: mod_base = OTHER; note = 2'-O-methoxyethyl modified nucleotide with phosphorothioate linkage
  modified_base 5: mod_base = OTHER; note = 2'-O-methoxyethyl modified nucleotide with phosphorothioate linkage
  modified_base 6: mod_base = OTHER; note = Nucleotide with phosphorothioate linkage
  modified_base 7: mod_base = OTHER; note = Thymine with phosphorothioate linkage
  modified_base 8: mod_base = OTHER; note = Nucleotide with phosphorothioate linkage
  modified_base 9: mod_base = OTHER; note = Nucleotide with phosphorothioate linkage
  modified_base 10: mod_base = OTHER; note = Nucleotide with phosphorothioate linkage
  modified_base 11: mod_base = OTHER; note = Nucleotide with phosphorothioate linkage
  modified_base 12: mod_base = OTHER; note = 5-methylcytosine with phosphorothioate linkage
  modified_base 13: mod_base = OTHER; note = Nucleotide with phosphorothioate linkage
  modified_base 14: mod_base = OTHER; note = Nucleotide with phosphorothioate linkage
  modified_base 15: mod_base = OTHER; note = Nucleotide with R-stereo-defined phosphorothioate linkage
  modified_base 16: mod_base = OTHER; note = 2'-O-methoxyethyl modified nucleotide with phosphorothioate linkage
  modified_base 17: mod_base = OTHER; note = 2'-O-methoxyethyl modified thymine with phosphorothioate linkage
  modified_base 18: mod_base = OTHER; note = 2'-O-methoxyethyl modified nucleotide with phosphorothioate linkage
  modified_base 19: mod_base = OTHER; note = 2'-O-methoxyethyl 5-methylcytosine with phosphorothioate linkage
  modified_base 20: mod_base = OTHER; note = 2'-O-methoxyethyl modified nucleotide
  misc_feature 1..5: note = RNA
  misc_feature 6..15: note = DNA
  misc_feature 16..20: note = RNA
cagaggtgaagcgaagtgca

SEQ ID NO: 238 - DNA, 20 bp, synthetic construct
  source 1..20: mol_type = other DNA
  modified_base 1: mod_base = OTHER; note = 2'-O-methoxyethyl modified nucleotide with phosphorothioate linkage
  modified_base 2: mod_base = OTHER; note = 2'-O-methoxyethyl modified nucleotide with phosphorothioate linkage
  modified_base 3: mod_base = OTHER; note = 2'-O-methoxyethyl modified nucleotide with phosphorothioate linkage
  modified_base 4: mod_base = OTHER; note = 2'-O-methoxyethyl modified thymine with phosphorothioate linkage
  modified_base 5: mod_base = OTHER; note = 2'-O-methoxyethyl modified nucleotide with phosphorothioate linkage
  modified_base 6: mod_base = OTHER; note = 8-amino-adenosine with phosphorothioate linkage
  modified_base 7: mod_base = OTHER; note = Nucleotide with phosphorothioate linkage
  modified_base 8: mod_base = OTHER; note = Nucleotide with phosphorothioate linkage
  modified_base 9: mod_base = OTHER; note = 5-methylcytosine with phosphorothioate linkage
  modified_base 10: mod_base = OTHER; note = Nucleotide with phosphorothioate linkage
  modified_base 11: mod_base = OTHER; note = Nucleotide with phosphorothioate linkage
  modified_base 12: mod_base = OTHER; note = Nucleotide with phosphorothioate linkage
  modified_base 13: mod_base = OTHER; note = Nucleotide with phosphorothioate linkage
  modified_base 14: mod_base = OTHER; note = Thymine with phosphorothioate linkage
  modified_base 15: mod_base = OTHER; note = Nucleotide with phosphorothioate linkage
  modified_base 16: mod_base = OTHER; note = 2'-O-methoxyethyl 5-methylcytosine with phosphorothioate linkage
  modified_base 17: mod_base = OTHER; note = 2'-O-methoxyethyl modified nucleotide with phosphorothioate linkage
  modified_base 18: mod_base = OTHER; note = 2'-O-methoxyethyl 5-methylcytosine with phosphorothioate linkage
  modified_base 19: mod_base = OTHER; note = 2'-O-methoxyethyl modified nucleotide with phosphorothioate linkage
  modified_base 20: mod_base = OTHER; note = 2'-O-methoxyethyl 5-methylcytosine
  misc_feature 1..5: note = RNA
  misc_feature 6..15: note = DNA
  misc_feature 16..20: note = RNA
aggtgaagcgaagtgcacac

SEQ ID NO: 239 - DNA, 20 bp, synthetic construct
  source 1..20: mol_type = other DNA
  modified_base 1: mod_base = OTHER; note = 2'-O-methoxyethyl modified nucleotide with phosphorothioate linkage
  modified_base 2: mod_base = OTHER; note = 2'-O-methoxyethyl modified nucleotide with phosphorothioate linkage
  modified_base 3: mod_base = OTHER; note = 2'-O-methoxyethyl modified nucleotide with phosphorothioate linkage
  modified_base 4: mod_base = OTHER; note = 2'-O-methoxyethyl modified thymine with phosphorothioate linkage
  modified_base 5: mod_base = OTHER; note = 2'-O-methoxyethyl modified nucleotide with phosphorothioate linkage
  modified_base 6: mod_base = OTHER; note = Nucleotide with phosphorothioate linkage
  modified_base 7: mod_base = OTHER; note = 8-amino-adenosine with phosphorothioate linkage
  modified_base 8: mod_base = OTHER; note = Nucleotide with phosphorothioate linkage
  modified_base 9: mod_base = OTHER; note = 5-methylcytosine with phosphorothioate linkage
  modified_base 10: mod_base = OTHER; note = Nucleotide with phosphorothioate linkage
  modified_base 11: mod_base = OTHER; note = Nucleotide with phosphorothioate linkage
  modified_base 12: mod_base = OTHER; note = Nucleotide with phosphorothioate linkage
  modified_base 13: mod_base = OTHER; note = Nucleotide with phosphorothioate linkage
  modified_base 14: mod_base = OTHER; note = Thymine with phosphorothioate linkage
  modified_base 15: mod_base = OTHER; note = Nucleotide with phosphorothioate linkage
  modified_base 16: mod_base = OTHER; note = 2'-O-methoxyethyl 5-methylcytosine with phosphorothioate linkage
  modified_base 17: mod_base = OTHER; note = 2'-O-methoxyethyl modified nucleotide with phosphorothioate linkage
  modified_base 18: mod_base = OTHER; note = 2'-O-methoxyethyl 5-methylcytosine with phosphorothioate linkage
  modified_base 19: mod_base = OTHER; note = 2'-O-methoxyethyl modified nucleotide with phosphorothioate linkage
  modified_base 20: mod_base = OTHER; note = 2'-O-methoxyethyl 5-methylcytosine
  misc_feature 1..5: note = RNA
  misc_feature 6..15: note = DNA
  misc_feature 16..20: note = RNA
aggtgaagcgaagtgcacac

SEQ ID NO: 240 - DNA, 20 bp, synthetic construct
  source 1..20: mol_type = other DNA
  modified_base 1: mod_base = OTHER; note = 2'-O-methoxyethyl modified nucleotide with phosphorothioate linkage
  modified_base 2: mod_base = OTHER; note = 2'-O-methoxyethyl modified nucleotide with phosphorothioate linkage
  modified_base 3: mod_base = OTHER; note = 2'-O-methoxyethyl modified nucleotide with phosphorothioate linkage
  modified_base 4: mod_base = OTHER; note = 2'-O-methoxyethyl modified thymine with phosphorothioate linkage
  modified_base 5: mod_base = OTHER; note = 2'-O-methoxyethyl modified nucleotide with phosphorothioate linkage
  modified_base 6: mod_base = OTHER; note = Nucleotide with phosphorothioate linkage
  modified_base 7: mod_base = OTHER; note = Nucleotide with phosphorothioate linkage
  modified_base 8: mod_base = OTHER; note = 8-amino-guanosine with phosphorothioate linkage
  modified_base 9: mod_base = OTHER; note = 5-methylcytosine with phosphorothioate linkage
  modified_base 10: mod_base = OTHER; note = Nucleotide with phosphorothioate linkage
  modified_base 11: mod_base = OTHER; note = Nucleotide with phosphorothioate linkage
  modified_base 12: mod_base = OTHER; note = Nucleotide with phosphorothioate linkage
  modified_base 13: mod_base = OTHER; note = Nucleotide with phosphorothioate linkage
  modified_base 14: mod_base = OTHER; note = Thymine with phosphorothioate linkage
  modified_base 15: mod_base = OTHER; note = Nucleotide with phosphorothioate linkage
  modified_base 16: mod_base = OTHER; note = 2'-O-methoxyethyl 5-methylcytosine with phosphorothioate linkage
  modified_base 17: mod_base = OTHER; note = 2'-O-methoxyethyl modified nucleotide with phosphorothioate linkage
  modified_base 18: mod_base = OTHER; note = 2'-O-methoxyethyl 5-methylcytosine with phosphorothioate linkage
  modified_base 19: mod_base = OTHER; note = 2'-O-methoxyethyl modified nucleotide with phosphorothioate linkage
  modified_base 20: mod_base = OTHER; note = 2'-O-methoxyethyl 5-methylcytosine
  misc_feature 1..5: note = RNA
  misc_feature 6..15: note = DNA
  misc_feature 16..20: note = RNA
aggtgaagcgaagtgcacac

SEQ ID NO: 241 - DNA, 20 bp, synthetic construct
  source 1..20: mol_type = other DNA
  modified_base 1: mod_base = OTHER; note = 2'-O-methoxyethyl modified nucleotide with phosphorothioate linkage
  modified_base 2: mod_base = OTHER; note = 2'-O-methoxyethyl modified nucleotide with phosphorothioate linkage
  modified_base 3: mod_base = OTHER; note = 2'-O-methoxyethyl modified nucleotide with phosphorothioate linkage
  modified_base 4: mod_base = OTHER; note = 2'-O-methoxyethyl modified thymine with phosphorothioate linkage
  modified_base 5: mod_base = OTHER; note = 2'-O-methoxyethyl modified nucleotide with phosphorothioate linkage
  modified_base 6: mod_base = OTHER; note = Nucleotide with phosphorothioate linkage
  modified_base 7: mod_base = OTHER; note = Nucleotide with phosphorothioate linkage
  modified_base 8: mod_base = OTHER; note = Nucleotide with phosphorothioate linkage
  modified_base 9: mod_base = OTHER; note = 5'-hydroxy-cytosine with phosphorothioate linkage
  modified_base 10: mod_base = OTHER; note = Nucleotide with phosphorothioate linkage
  modified_base 11: mod_base = OTHER; note = Nucleotide with phosphorothioate linkage
  modified_base 12: mod_base = OTHER; note = Nucleotide with phosphorothioate linkage
  modified_base 13: mod_base = OTHER; note = Nucleotide with phosphorothioate linkage
  modified_base 14: mod_base = OTHER; note = Thymine with phosphorothioate linkage
  modified_base 15: mod_base = OTHER; note = Nucleotide with phosphorothioate linkage
  modified_base 16: mod_base = OTHER; note = 2'-O-methoxyethyl 5-methylcytosine with phosphorothioate linkage
  modified_base 17: mod_base = OTHER; note = 2'-O-methoxyethyl modified nucleotide with phosphorothioate linkage
  modified_base 18: mod_base = OTHER; note = 2'-O-methoxyethyl 5-methylcytosine with phosphorothioate linkage
  modified_base 19: mod_base = OTHER; note = 2'-O-methoxyethyl modified nucleotide with phosphorothioate linkage
  modified_base 20: mod_base = OTHER; note = 2'-O-methoxyethyl 5-methylcytosine
  misc_feature 1..5: note = RNA
  misc_feature 6..15: note = DNA
  misc_feature 16..20: note = RNA
aggtgaagcgaagtgcacac

SEQ ID NO: 242 - DNA, 20 bp, synthetic construct
  source 1..20: mol_type = other DNA
  modified_base 1: mod_base = OTHER; note = 2'-O-methoxyethyl modified nucleotide with phosphorothioate linkage
  modified_base 2: mod_base = OTHER; note = 2'-O-methoxyethyl modified nucleotide with phosphorothioate linkage
  modified_base 3: mod_base = OTHER; note = 2'-O-methoxyethyl modified nucleotide with phosphorothioate linkage
  modified_base 4: mod_base = OTHER; note = 2'-O-methoxyethyl modified thymine with phosphorothioate linkage
  modified_base 5: mod_base = OTHER; note = 2'-O-methoxyethyl modified nucleotide with phosphorothioate linkage
  modified_base 6: mod_base = OTHER; note = Nucleotide with phosphorothioate linkage
  modified_base 7: mod_base = OTHER; note = Nucleotide with phosphorothioate linkage
  modified_base 8: mod_base = OTHER; note = Nucleotide with phosphorothioate linkage
  modified_base 9: mod_base = OTHER; note = 5-methylcytosine with phosphorothioate linkage
  modified_base 10: mod_base = OTHER; note = 8-amino-guanosine with phosphorothioate linkage
  modified_base 11: mod_base = OTHER; note = Nucleotide with phosphorothioate linkage
  modified_base 12: mod_base = OTHER; note = Nucleotide with phosphorothioate linkage
  modified_base 13: mod_base = OTHER; note = Nucleotide with phosphorothioate linkage
  modified_base 14: mod_base = OTHER; note = Thymine with phosphorothioate linkage
  modified_base 15: mod_base = OTHER; note = Nucleotide with phosphorothioate linkage
  modified_base 16: mod_base = OTHER; note = 2'-O-methoxyethyl 5-methylcytosine with phosphorothioate linkage
  modified_base 17: mod_base = OTHER; note = 2'-O-methoxyethyl modified nucleotide with phosphorothioate linkage
  modified_base 18: mod_base = OTHER; note = 2'-O-methoxyethyl 5-methylcytosine with phosphorothioate linkage
  modified_base 19: mod_base = OTHER; note = 2'-O-methoxyethyl modified nucleotide with phosphorothioate linkage
  modified_base 20: mod_base = OTHER; note = 2'-O-methoxyethyl 5-methylcytosine
  misc_feature 1..5: note = RNA
  misc_feature 6..15: note = DNA
  misc_feature 16..20: note = RNA
aggtgaagcgaagtgcacac

SEQ ID NO: 243 - DNA, 20 bp, synthetic construct
  source 1..20: mol_type = other DNA
  modified_base 1: mod_base = OTHER; note = 2'-O-methoxyethyl modified nucleotide with phosphorothioate linkage
  modified_base 2: mod_base = OTHER; note = 2'-O-methoxyethyl modified nucleotide with phosphorothioate linkage
  modified_base 3: mod_base = OTHER; note = 2'-O-methoxyethyl modified nucleotide with phosphorothioate linkage
  modified_base 4: mod_base = OTHER; note = 2'-O-methoxyethyl modified thymine with phosphorothioate linkage
  modified_base 5: mod_base = OTHER; note = 2'-O-methoxyethyl modified nucleotide with phosphorothioate linkage
  modified_base 6: mod_base = OTHER; note = Nucleotide with phosphorothioate linkage
  modified_base 7: mod_base = OTHER; note = Nucleotide with phosphorothioate linkage
  modified_base 8: mod_base = OTHER; note = Nucleotide with phosphorothioate linkage
  modified_base 9: mod_base = OTHER; note = 5-methylcytosine with phosphorothioate linkage
  modified_base 10: mod_base = OTHER; note = Nucleotide with phosphorothioate linkage
  modified_base 11: mod_base = OTHER; note = 8-amino-adenosine with phosphorothioate linkage
  modified_base 12: mod_base = OTHER; note = Nucleotide with phosphorothioate linkage
  modified_base 13: mod_base = OTHER; note = Nucleotide with phosphorothioate linkage
  modified_base 14: mod_base = OTHER; note = Thymine with phosphorothioate linkage
  modified_base 15: mod_base = OTHER; note = Nucleotide with phosphorothioate linkage
  modified_base 16: mod_base = OTHER; note = 2'-O-methoxyethyl 5-methylcytosine with phosphorothioate linkage
  modified_base 17: mod_base = OTHER; note = 2'-O-methoxyethyl modified nucleotide with phosphorothioate linkage
  modified_base 18: mod_base = OTHER; note = 2'-O-methoxyethyl 5-methylcytosine with phosphorothioate linkage
  modified_base 19: mod_base = OTHER; note = 2'-O-methoxyethyl modified nucleotide with phosphorothioate linkage
  modified_base 20: mod_base = OTHER; note = 2'-O-methoxyethyl 5-methylcytosine
  misc_feature 1..5: note = RNA
  misc_feature 6..15: note = DNA
  misc_feature 16..20: note = RNA
aggtgaagcgaagtgcacac

SEQ ID NO: 244 - DNA, 20 bp, synthetic construct
  source 1..20: mol_type = other DNA
  modified_base 1: mod_base = OTHER; note = 2'-O-methoxyethyl modified nucleotide with phosphorothioate linkage
  modified_base 2: mod_base = OTHER; note = 2'-O-methoxyethyl modified nucleotide with phosphorothioate linkage
  modified_base 3: mod_base = OTHER; note = 2'-O-methoxyethyl modified nucleotide with phosphorothioate linkage
  modified_base 4: mod_base = OTHER; note = 2'-O-methoxyethyl modified thymine with phosphorothioate linkage
  modified_base 5: mod_base = OTHER; note = 2'-O-methoxyethyl modified nucleotide with phosphorothioate linkage
  modified_base 6: mod_base = OTHER; note = Nucleotide with phosphorothioate linkage
  modified_base 7: mod_base = OTHER; note = Nucleotide with phosphorothioate linkage
  modified_base 8: mod_base = OTHER; note = Nucleotide with phosphorothioate linkage
  modified_base 9: mod_base = OTHER; note = 5-methylcytosine with phosphorothioate linkage
  modified_base 10: mod_base = OTHER; note = Nucleotide with phosphorothioate linkage
  modified_base 11: mod_base = OTHER; note = Nucleotide with phosphorothioate linkage
  modified_base 12: mod_base = OTHER; note = 8-amino-adenosine with phosphorothioate linkage
  modified_base 13: mod_base = OTHER; note = Nucleotide with phosphorothioate linkage
  modified_base 14: mod_base = OTHER; note = Thymine with phosphorothioate linkage
  modified_base 15: mod_base = OTHER; note = Nucleotide with phosphorothioate linkage
  modified_base 16: mod_base = OTHER; note = 2'-O-methoxyethyl 5-methylcytosine with phosphorothioate linkage
  modified_base 17: mod_base = OTHER; note = 2'-O-methoxyethyl modified nucleotide with phosphorothioate linkage
  modified_base 18: mod_base = OTHER; note = 2'-O-methoxyethyl 5-methylcytosine with phosphorothioate linkage
  modified_base 19: mod_base = OTHER; note = 2'-O-methoxyethyl modified nucleotide with phosphorothioate linkage
  modified_base 20: mod_base = OTHER; note = 2'-O-methoxyethyl 5-methylcytosine
  misc_feature 1..5: note = RNA
  misc_feature 6..15: note = DNA
  misc_feature 16..20: note = RNA
aggtgaagcgaagtgcacac

SEQ ID NO: 245 - DNA, 20 bp, synthetic construct
  source 1..20: mol_type = other DNA
  modified_base 1: mod_base = OTHER; note = 2'-O-methoxyethyl modified nucleotide with phosphorothioate linkage
  modified_base 2: mod_base = OTHER; note = 2'-O-methoxyethyl modified nucleotide with phosphorothioate linkage
  modified_base 3: mod_base = OTHER; note = 2'-O-methoxyethyl modified nucleotide with phosphorothioate linkage
  modified_base 4: mod_base = OTHER; note = 2'-O-methoxyethyl modified thymine with phosphorothioate linkage
  modified_base 5: mod_base = OTHER; note = 2'-O-methoxyethyl modified nucleotide with phosphorothioate linkage
  modified_base 6: mod_base = OTHER; note = Nucleotide with phosphorothioate linkage
  modified_base 7: mod_base = OTHER; note = Nucleotide with phosphorothioate linkage
  modified_base 8: mod_base = OTHER; note = Nucleotide with phosphorothioate linkage
  modified_base 9: mod_base = OTHER; note = 5-methylcytosine with phosphorothioate linkage
  modified_base 10: mod_base = OTHER; note = Nucleotide with phosphorothioate linkage
  modified_base 11: mod_base = OTHER; note = Nucleotide with phosphorothioate linkage
  modified_base 12: mod_base = OTHER; note = Nucleotide with phosphorothioate linkage
  modified_base 13: mod_base = OTHER; note = 8-amino-guanosine with phosphorothioate linkage
  modified_base 14: mod_base = OTHER; note = Thymine with phosphorothioate linkage
  modified_base 15: mod_base = OTHER; note = Nucleotide with phosphorothioate linkage
  modified_base 16: mod_base = OTHER; note = 2'-O-methoxyethyl 5-methylcytosine with phosphorothioate linkage
  modified_base 17: mod_base = OTHER; note = 2'-O-methoxyethyl modified nucleotide with phosphorothioate linkage
  modified_base 18: mod_base = OTHER; note = 2'-O-methoxyethyl 5-methylcytosine with phosphorothioate linkage
  modified_base 19: mod_base = OTHER; note = 2'-O-methoxyethyl modified nucleotide with phosphorothioate linkage
  modified_base 20: mod_base = OTHER; note = 2'-O-methoxyethyl 5-methylcytosine
  misc_feature 1..5: note = RNA
  misc_feature 6..15: note = DNA
  misc_feature 16..20: note = RNA
aggtgaagcgaagtgcacac

SEQ ID NO: 246 - DNA, 20 bp, synthetic construct
  source 1..20: mol_type = other DNA
  modified_base 1: mod_base = OTHER; note = 2'-O-methoxyethyl modified nucleotide with phosphorothioate linkage
  modified_base 2: mod_base = OTHER; note = 2'-O-methoxyethyl modified nucleotide with phosphorothioate linkage
  modified_base 3: mod_base = OTHER; note = 2'-O-methoxyethyl modified nucleotide with phosphorothioate linkage
  modified_base 4: mod_base = OTHER; note = 2'-O-methoxyethyl modified thymine with phosphorothioate linkage
  modified_base 5: mod_base = OTHER; note = 2'-O-methoxyethyl modified nucleotide with phosphorothioate linkage
  modified_base 6: mod_base = OTHER; note = Nucleotide with phosphorothioate linkage
  modified_base 7: mod_base = OTHER; note = Nucleotide with phosphorothioate linkage
  modified_base 8: mod_base = OTHER; note = Nucleotide with phosphorothioate linkage
  modified_base 9: mod_base = OTHER; note = 5-methylcytosine with phosphorothioate linkage
  modified_base 10: mod_base = OTHER; note = Nucleotide with phosphorothioate linkage
  modified_base 11: mod_base = OTHER; note = Nucleotide with phosphorothioate linkage
  modified_base 12: mod_base = OTHER; note = Nucleotide with phosphorothioate linkage
  modified_base 13: mod_base = OTHER; note = Nucleotide with phosphorothioate linkage
  modified_base 14: mod_base = OTHER; note = 2-thio-thymine with phosphorothioate linkage
  modified_base 15: mod_base = OTHER; note = Nucleotide with phosphorothioate linkage
  modified_base 16: mod_base = OTHER; note = 2'-O-methoxyethyl 5-methylcytosine with phosphorothioate linkage
  modified_base 17: mod_base = OTHER; note = 2'-O-methoxyethyl modified nucleotide with phosphorothioate linkage
  modified_base 18: mod_base = OTHER; note = 2'-O-methoxyethyl 5-methylcytosine with phosphorothioate linkage
  modified_base 19: mod_base = OTHER; note = 2'-O-methoxyethyl modified nucleotide with phosphorothioate linkage
  modified_base 20: mod_base = OTHER; note = 2'-O-methoxyethyl 5-methylcytosine
  misc_feature 1..5: note = RNA
  misc_feature 6..15: note = DNA
  misc_feature 16..20: note = RNA
aggtgaagcgaagtgcacac

SEQ ID NO: 247 - DNA, 20 bp, synthetic construct
  source 1..20: mol_type = other DNA
  modified_base 1: mod_base = OTHER; note = 2'-O-methoxyethyl modified nucleotide with phosphorothioate linkage
  modified_base 2: mod_base = OTHER; note = 2'-O-methoxyethyl modified nucleotide with phosphorothioate linkage
  modified_base 3: mod_base = OTHER; note = 2'-O-methoxyethyl modified nucleotide with phosphorothioate linkage
  modified_base 4: mod_base = OTHER; note = 2'-O-methoxyethyl modified thymine with phosphorothioate linkage
  modified_base 5: mod_base = OTHER; note = 2'-O-methoxyethyl modified nucleotide with phosphorothioate linkage
  modified_base 6: mod_base = OTHER; note = Nucleotide with phosphorothioate linkage
  modified_base 7: mod_base = OTHER; note = Nucleotide with phosphorothioate linkage
  modified_base 8: mod_base = OTHER; note = Nucleotide with phosphorothioate linkage
  modified_base 9: mod_base = OTHER; note = 5-methylcytosine with phosphorothioate linkage
  modified_base 10: mod_base = OTHER; note = Nucleotide with phosphorothioate linkage
  modified_base 11: mod_base = OTHER; note = Nucleotide with phosphorothioate linkage
  modified_base 12: mod_base = OTHER; note = Nucleotide with phosphorothioate linkage
  modified_base 13: mod_base = OTHER; note = Nucleotide with phosphorothioate linkage
  modified_base 14: mod_base = OTHER; note = Thymine with phosphorothioate linkage
  modified_base 15: mod_base = OTHER; note = 8-amino-guanosine with phosphorothioate linkage
  modified_base 16: mod_base = OTHER; note = 2'-O-methoxyethyl 5-methylcytosine with phosphorothioate linkage
  modified_base 17: mod_base = OTHER; note = 2'-O-methoxyethyl modified nucleotide with phosphorothioate linkage
  modified_base 18: mod_base = OTHER; note = 2'-O-methoxyethyl 5-methylcytosine with phosphorothioate linkage
  modified_base 19: mod_base = OTHER; note = 2'-O-methoxyethyl modified nucleotide with phosphorothioate linkage
  modified_base 20: mod_base = OTHER; note = 2'-O-methoxyethyl 5-methylcytosine
  misc_feature 1..5: note = RNA
  misc_feature 6..15: note = DNA
  misc_feature 16..20: note = RNA
aggtgaagcgaagtgcacac

SEQ ID NO: 248 - DNA, 20 bp, synthetic construct
  source 1..20: mol_type = other DNA
  modified_base 1: mod_base = OTHER; note = 2'-O-methoxyethyl 5-methylcytosine with phosphorothioate linkage
  modified_base 2: mod_base = OTHER; note = 2'-O-methoxyethyl modified nucleotide with phosphorothioate linkage
  modified_base 3: mod_base = OTHER; note = 2'-O-methoxyethyl modified nucleotide with phosphorothioate linkage
  modified_base 4: mod_base = OTHER; note = 2'-O-methoxyethyl modified nucleotide with phosphorothioate linkage
  modified_base 5: mod_base = OTHER; note = 2'-O-methoxyethyl modified nucleotide with phosphorothioate linkage
  modified_base 6: mod_base = OTHER; note = Nucleotide with S-stereo-defined phosphorothioate linkage
  modified_base 7: mod_base = OTHER; note = Thymine with S-stereo-defined phosphorothioate linkage
  modified_base 8: mod_base = OTHER; note = Nucleotide with R-stereo-defined phosphorothioate linkage
  modified_base 9: mod_base = OTHER; note = Nucleotide with phosphorothioate linkage
  modified_base 10: mod_base = OTHER; note = Nucleotide with phosphorothioate linkage
  modified_base 11: mod_base = OTHER; note = Nucleotide with phosphorothioate linkage
  modified_base 12: mod_base = OTHER; note = 5-methylcytosine with phosphorothioate linkage
  modified_base 13: mod_base = OTHER; note = Nucleotide with phosphorothioate linkage
  modified_base 14: mod_base = OTHER; note = Nucleotide with phosphorothioate linkage
  modified_base 15: mod_base = OTHER; note = Nucleotide with phosphorothioate linkage
  modified_base 16: mod_base = OTHER; note = 2'-O-methoxyethyl modified nucleotide with phosphorothioate linkage
  modified_base 17: mod_base = OTHER; note = 2'-O-methoxyethyl modified thymine with phosphorothioate linkage
  modified_base 18: mod_base = OTHER; note = 2'-O-methoxyethyl modified nucleotide with phosphorothioate linkage
  modified_base 19: mod_base = OTHER; note = 2'-O-methoxyethyl 5-methylcytosine with phosphorothioate linkage
  modified_base 20: mod_base = OTHER; note = 2'-O-methoxyethyl modified nucleotide
  misc_feature 1..5: note = RNA
  misc_feature 6..15: note = DNA
  misc_feature 16..20: note = RNA
cagaggtgaagcgaagtgca

SEQ ID NO: 249 - DNA, 20 bp, synthetic construct
  source 1..20: mol_type = other DNA
  modified_base 1: mod_base = OTHER; note = 2'-O-methoxyethyl 5-methylcytosine with phosphorothioate linkage
  modified_base 2: mod_base = OTHER; note = 2'-O-methoxyethyl modified nucleotide with phosphorothioate linkage
  modified_base 3: mod_base = OTHER; note = 2'-O-methoxyethyl modified nucleotide with phosphorothioate linkage
  modified_base 4: mod_base = OTHER; note = 2'-O-methoxyethyl modified nucleotide with phosphorothioate linkage
  modified_base 5: mod_base = OTHER; note = 2'-O-methoxyethyl modified nucleotide with phosphorothioate linkage
  modified_base 6: mod_base = OTHER; note = Nucleotide with R-stereo-defined phosphorothioate linkage
  modified_base 7: mod_base = OTHER; note = Thymine with R-stereo-defined phosphorothioate linkage
  modified_base 8: mod_base = OTHER; note = Nucleotide with S-stereo-defined phosphorothioate linkage
  modified_base 9: mod_base = OTHER; note = Nucleotide with phosphorothioate linkage
  modified_base 10: mod_base = OTHER; note = Nucleotide with phosphorothioate linkage
  modified_base 11: mod_base = OTHER; note = Nucleotide with phosphorothioate linkage
  modified_base 12: mod_base = OTHER; note = 5-methylcytosine with phosphorothioate linkage
  modified_base 13: mod_base = OTHER; note = Nucleotide with phosphorothioate linkage
  modified_base 14: mod_base = OTHER; note = Nucleotide with phosphorothioate linkage
  modified_base 15: mod_base = OTHER; note = Nucleotide with phosphorothioate linkage
  modified_base 16: mod_base = OTHER; note = 2'-O-methoxyethyl modified nucleotide with phosphorothioate linkage
  modified_base 17: mod_base = OTHER; note = 2'-O-methoxyethyl modified thymine with phosphorothioate linkage
  modified_base 18: mod_base = OTHER; note = 2'-O-methoxyethyl modified nucleotide with phosphorothioate linkage
  modified_base 19: mod_base = OTHER; note = 2'-O-methoxyethyl 5-methylcytosine with phosphorothioate linkage
  modified_base 20: mod_base = OTHER; note = 2'-O-methoxyethyl modified nucleotide
  misc_feature 1..5: note = RNA
  misc_feature 6..15: note = DNA
  misc_feature 16..20: note = RNA
cagaggtgaagcgaagtgca

SEQ ID NO: 250 - DNA, 20 bp, synthetic construct
  source 1..20: mol_type = other DNA
  modified_base 1: mod_base = OTHER; note = 2'-O-methoxyethyl modified nucleotide with phosphorothioate linkage
  modified_base 2: mod_base = OTHER; note = 2'-O-methoxyethyl 5-methylcytosine with phosphorothioate linkage
  modified_base 3: mod_base = OTHER; note = 2'-O-methoxyethyl modified nucleotide with phosphorothioate linkage
  modified_base 4: mod_base = OTHER; note = 2'-O-methoxyethyl modified thymine with phosphorothioate linkage
  modified_base 5: mod_base = OTHER; note = 2'-O-methoxyethyl modified nucleotide with phosphorothioate linkage
  modified_base 6: mod_base = OTHER; note = 5-methylcytosine with S-stereo-defined phosphorothioate linkage
  modified_base 7: mod_base = OTHER; note = Nucleotide with phosphorothioate linkage
  modified_base 8: mod_base = OTHER; note = Nucleotide with phosphorothioate linkage
  modified_base 9: mod_base = OTHER; note = Nucleotide with phosphorothioate linkage
  modified_base 10: mod_base = OTHER; note = Nucleotide with phosphorothioate linkage
  modified_base 11: mod_base = OTHER; note = Nucleotide with phosphorothioate linkage
  modified_base 12: mod_base = OTHER; note = Thymine with phosphorothioate linkage
  modified_base 13: mod_base = OTHER; note = Nucleotide with phosphorothioate linkage
  modified_base 14: mod_base = OTHER; note = Nucleotide with phosphorothioate linkage
  modified_base 15: mod_base = OTHER; note = Nucleotide with phosphorothioate linkage
  modified_base 16: mod_base = OTHER; note = 2'-O-methoxyethyl modified nucleotide with phosphorothioate linkage
  modified_base 17: mod_base = OTHER; note = 2'-O-methoxyethyl 5-methylcytosine with phosphorothioate linkage
  modified_base 18: mod_base = OTHER; note = 2'-O-methoxyethyl modified nucleotide with phosphorothioate linkage
  modified_base 19: mod_base = OTHER; note = 2'-O-methoxyethyl modified nucleotide with phosphorothioate linkage
  modified_base 20: mod_base = OTHER; note = 2'-O-methoxyethyl modified nucleotide
  misc_feature 1..5: note = RNA
  misc_feature 6..15: note = DNA
  misc_feature 16..20: note = RNA
acgtgcagaggtgaagcgaa

SEQ ID NO: 251 - DNA, 20 bp, synthetic construct
  source 1..20: mol_type = other DNA
  modified_base 1: mod_base = OTHER; note = 2'-O-methoxyethyl modified nucleotide with phosphorothioate linkage
  modified_base 2: mod_base = OTHER; note = 2'-O-methoxyethyl 5-methylcytosine with phosphorothioate linkage
  modified_base 3: mod_base = OTHER; note = 2'-O-methoxyethyl modified nucleotide with phosphorothioate linkage
  modified_base 4: mod_base = OTHER; note = 2'-O-methoxyethyl modified thymine with phosphorothioate linkage
  modified_base 5: mod_base = OTHER; note = 2'-O-methoxyethyl modified nucleotide with phosphorothioate linkage
  modified_base 6: mod_base = OTHER; note = 5-methylcytosine with phosphorothioate linkage
  modified_base 7: mod_base = OTHER; note = Nucleotide with S-stereo-defined phosphorothioate linkage
  modified_base 8: mod_base = OTHER; note = Nucleotide with phosphorothioate linkage
  modified_base 9: mod_base = OTHER; note = Nucleotide with phosphorothioate linkage
  modified_base 10: mod_base = OTHER; note = Nucleotide with phosphorothioate linkage
  modified_base 11: mod_base = OTHER; note = Nucleotide with phosphorothioate linkage
  modified_base 12: mod_base = OTHER; note = Thymine with phosphorothioate linkage
  modified_base 13: mod_base = OTHER; note = Nucleotide with phosphorothioate linkage
  modified_base 14: mod_base = OTHER; note = Nucleotide with phosphorothioate linkage
  modified_base 15: mod_base = OTHER; note = Nucleotide with phosphorothioate linkage
  modified_base 16: mod_base = OTHER; note = 2'-O-methoxyethyl modified nucleotide with phosphorothioate linkage
  modified_base 17: mod_base = OTHER; note = 2'-O-methoxyethyl 5-methylcytosine with phosphorothioate linkage
  modified_base 18: mod_base = OTHER; note = 2'-O-methoxyethyl modified nucleotide with phosphorothioate linkage
  modified_base 19: mod_base = OTHER; note = 2'-O-methoxyethyl modified nucleotide with phosphorothioate linkage
  modified_base 20: mod_base = OTHER; note = 2'-O-methoxyethyl modified nucleotide
  misc_feature 1..5: note = RNA
  misc_feature 6..15: note = DNA
  misc_feature 16..20: note = RNA
acgtgcagaggtgaagcgaa

SEQ ID NO: 252 - DNA, 20 bp, synthetic construct
  source 1..20: mol_type = other DNA
  modified_base 1: mod_base = OTHER; note = 2'-O-methoxyethyl modified nucleotide with phosphorothioate linkage
  modified_base 2: mod_base = OTHER; note = 2'-O-methoxyethyl 5-methylcytosine with phosphorothioate linkage
  modified_base 3: mod_base = OTHER; note = 2'-O-methoxyethyl modified nucleotide with phosphorothioate linkage
  modified_base 4: mod_base = OTHER; note = 2'-O-methoxyethyl modified thymine with phosphorothioate linkage
  modified_base 5: mod_base = OTHER; note = 2'-O-methoxyethyl modified nucleotide with phosphorothioate linkage
  modified_base 6: mod_base = OTHER; note = 5-methylcytosine with phosphorothioate linkage
  modified_base 7: mod_base = OTHER; note = Nucleotide with phosphorothioate linkage
  modified_base 8: mod_base = OTHER; note = Nucleotide with S-stereo-defined phosphorothioate linkage
  modified_base 9: mod_base = OTHER; note = Nucleotide with phosphorothioate linkage
  modified_base 10: mod_base = OTHER; note = Nucleotide with phosphorothioate linkage
  modified_base 11: mod_base = OTHER; note = Nucleotide with phosphorothioate linkage
  modified_base 12: mod_base = OTHER; note = Thymine with phosphorothioate linkage
  modified_base 13: mod_base = OTHER; note = Nucleotide with phosphorothioate linkage
  modified_base 14: mod_base = OTHER; note = Nucleotide with phosphorothioate linkage
  modified_base 15: mod_base = OTHER; note = Nucleotide with phosphorothioate linkage
  modified_base 16: mod_base = OTHER; note = 2'-O-methoxyethyl modified nucleotide with phosphorothioate linkage
  modified_base 17: mod_base = OTHER; note = 2'-O-methoxyethyl 5-methylcytosine with phosphorothioate linkage
  modified_base 18: mod_base = OTHER; note = 2'-O-methoxyethyl modified nucleotide with phosphorothioate linkage
  modified_base 19: mod_base = OTHER; note = 2'-O-methoxyethyl modified nucleotide with phosphorothioate linkage
  modified_base 20: mod_base = OTHER; note = 2'-O-methoxyethyl modified nucleotide
  misc_feature 1..5: note = RNA
  misc_feature 6..15: note = DNA
  misc_feature 16..20: note = RNA
acgtgcagaggtgaagcgaa

SEQ ID NO: 253 - DNA, 20 bp, synthetic construct
  source 1..20: mol_type = other DNA
  modified_base 1: mod_base = OTHER; note = 2'-O-methoxyethyl modified nucleotide with phosphorothioate linkage
  modified_base 2: mod_base = OTHER; note = 2'-O-methoxyethyl 5-methylcytosine with phosphorothioate linkage
  modified_base 3: mod_base = OTHER; note = 2'-O-methoxyethyl modified nucleotide with phosphorothioate linkage
  modified_base 4: mod_base = OTHER; note = 2'-O-methoxyethyl modified thymine with phosphorothioate linkage
  modified_base 5: mod_base = OTHER; note = 2'-O-methoxyethyl modified nucleotide with phosphorothioate linkage
  modified_base 6: mod_base = OTHER; note = 5-methylcytosine with phosphorothioate linkage
  modified_base 7: mod_base = OTHER; note = Nucleotide with phosphorothioate linkage
  modified_base 8: mod_base = OTHER; note = Nucleotide with phosphorothioate linkage
  modified_base 9: mod_base = OTHER; note = Nucleotide with S-stereo-defined phosphorothioate linkage
  modified_base 10: mod_base = OTHER; note = Nucleotide with phosphorothioate linkage
  modified_base 11: mod_base = OTHER; note = Nucleotide with phosphorothioate linkage
  modified_base 12: mod_base = OTHER; note = Thymine with phosphorothioate linkage
  modified_base 13: mod_base = OTHER; note = Nucleotide with phosphorothioate linkage
  modified_base 14: mod_base = OTHER; note = Nucleotide with phosphorothioate linkage
  modified_base 15: mod_base = OTHER; note = Nucleotide with phosphorothioate linkage
  modified_base 16: mod_base = OTHER; note = 2'-O-methoxyethyl modified nucleotide with phosphorothioate linkage
  modified_base 17: mod_base = OTHER; note = 2'-O-methoxyethyl 5-methylcytosine with phosphorothioate linkage
  modified_base 18: mod_base = OTHER; note = 2'-O-methoxyethyl modified nucleotide with phosphorothioate linkage
  modified_base 19: mod_base = OTHER; note = 2'-O-methoxyethyl modified nucleotide with phosphorothioate linkage
  modified_base 20: mod_base = OTHER; note = 2'-O-methoxyethyl modified nucleotide
  misc_feature 1..5: note = RNA
  misc_feature 6..15: note = DNA
  misc_feature 16..20: note = RNA
acgtgcagaggtgaagcgaa

SEQ ID NO: 254 - DNA, 20 bp, synthetic construct
  source 1..20: mol_type = other DNA
  modified_base 1: mod_base = OTHER; note = 2'-O-methoxyethyl modified nucleotide with phosphorothioate linkage
  modified_base 2: mod_base = OTHER; note = 2'-O-methoxyethyl 5-methylcytosine with phosphorothioate linkage
  modified_base 3: mod_base = OTHER; note = 2'-O-methoxyethyl modified nucleotide with phosphorothioate linkage
  modified_base 4: mod_base = OTHER; note = 2'-O-methoxyethyl modified thymine with phosphorothioate linkage
  modified_base 5: mod_base = OTHER; note = 2'-O-methoxyethyl modified nucleotide with phosphorothioate linkage
  modified_base 6: mod_base = OTHER; note = 5-methylcytosine with phosphorothioate linkage
  modified_base 7: mod_base = OTHER; note = Nucleotide with phosphorothioate linkage
  modified_base 8: mod_base = OTHER; note = Nucleotide with phosphorothioate linkage
  modified_base 9: mod_base = OTHER; note = Nucleotide with phosphorothioate linkage
  modified_base 10: mod_base = OTHER; note = Nucleotide with S-stereo-defined phosphorothioate linkage
  modified_base 11: mod_base = OTHER; note = Nucleotide with phosphorothioate linkage
  modified_base 12: mod_base = OTHER; note = Thymine with phosphorothioate linkage
  modified_base 13: mod_base = OTHER; note = Nucleotide with phosphorothioate linkage
  modified_base 14: mod_base = OTHER; note = Nucleotide with phosphorothioate linkage
  modified_base 15: mod_base = OTHER; note = Nucleotide with phosphorothioate linkage
  modified_base 16: mod_base = OTHER; note = 2'-O-methoxyethyl modified nucleotide with phosphorothioate linkage
  modified_base 17: mod_base = OTHER; note = 2'-O-methoxyethyl 5-methylcytosine with phosphorothioate linkage
  modified_base 18: mod_base = OTHER; note = 2'-O-methoxyethyl modified nucleotide with phosphorothioate linkage
  modified_base 19: mod_base = OTHER; note = 2'-O-methoxyethyl modified nucleotide with phosphorothioate linkage
  modified_base 20: mod_base = OTHER; note = 2'-O-methoxyethyl modified nucleotide
  misc_feature 1..5: note = RNA
  misc_feature 6..15: note = DNA
  misc_feature 16..20: note = RNA
acgtgcagaggtgaagcgaa

SEQ ID NO: 255 - DNA, 20 bp, synthetic construct
  source 1..20: mol_type = other DNA
  modified_base 1: mod_base = OTHER; note = 2'-O-methoxyethyl modified nucleotide with phosphorothioate linkage
  modified_base 2: mod_base = OTHER; note = 2'-O-methoxyethyl 5-methylcytosine with phosphorothioate linkage
  modified_base 3: mod_base = OTHER; note = 2'-O-methoxyethyl modified nucleotide with phosphorothioate linkage
  modified_base 4: mod_base = OTHER; note = 2'-O-methoxyethyl modified thymine with phosphorothioate linkage
  modified_base 5: mod_base = OTHER; note = 2'-O-methoxyethyl modified nucleotide with phosphorothioate linkage
  modified_base 6: mod_base = OTHER; note = 5-methylcytosine with phosphorothioate linkage
  modified_base 7: mod_base = OTHER; note = Nucleotide with phosphorothioate linkage
  modified_base 8: mod_base = OTHER; note = Nucleotide with phosphorothioate linkage
  modified_base 9: mod_base = OTHER; note = Nucleotide with phosphorothioate linkage
  modified_base 10: mod_base = OTHER; note = Nucleotide with phosphorothioate linkage
  modified_base 11: mod_base = OTHER; note = Nucleotide with S-stereo-defined phosphorothioate linkage
  modified_base 12: mod_base = OTHER; note = Thymine with phosphorothioate linkage
  modified_base 13: mod_base = OTHER; note = Nucleotide with phosphorothioate linkage
  modified_base 14: mod_base = OTHER; note = Nucleotide with phosphorothioate linkage
  modified_base 15: mod_base = OTHER; note = Nucleotide with phosphorothioate linkage
  modified_base 16: mod_base = OTHER; note = 2'-O-methoxyethyl modified nucleotide with phosphorothioate linkage
  modified_base 17: mod_base = OTHER; note = 2'-O-methoxyethyl 5-methylcytosine with phosphorothioate linkage
  modified_base 18: mod_base = OTHER; note = 2'-O-methoxyethyl modified nucleotide with phosphorothioate linkage
  modified_base 19: mod_base = OTHER; note = 2'-O-methoxyethyl modified nucleotide with phosphorothioate linkage
  modified_base 20: mod_base = OTHER; note = 2'-O-methoxyethyl modified nucleotide
  misc_feature 1..5: note = RNA
  misc_feature 6..15: note = DNA
  misc_feature 16..20: note = RNA
acgtgcagaggtgaagcgaa

SEQ ID NO: 256 - DNA, 20 bp, synthetic construct
  source 1..20: mol_type = other DNA
  modified_base 1: mod_base = OTHER; note = 2'-O-methoxyethyl modified nucleotide with phosphorothioate linkage
  modified_base 2: mod_base = OTHER; note = 2'-O-methoxyethyl 5-methylcytosine with phosphorothioate linkage
  modified_base 3: mod_base = OTHER; note = 2'-O-methoxyethyl modified nucleotide with phosphorothioate linkage
  modified_base 4: mod_base = OTHER; note = 2'-O-methoxyethyl modified thymine with phosphorothioate linkage
  modified_base 5: mod_base = OTHER; note = 2'-O-methoxyethyl modified nucleotide with phosphorothioate linkage
  modified_base 6: mod_base = OTHER; note = 5-methylcytosine with phosphorothioate linkage
  modified_base 7: mod_base = OTHER; note = Nucleotide with phosphorothioate linkage
  modified_base 8: mod_base = OTHER; note = Nucleotide with phosphorothioate linkage
  modified_base 9: mod_base = OTHER; note = Nucleotide with phosphorothioate linkage
  modified_base 10: mod_base = OTHER; note = Nucleotide with phosphorothioate linkage
  modified_base 11: mod_base = OTHER; note = Nucleotide with phosphorothioate linkage
  modified_base 12: mod_base = OTHER; note = Thymine with S-stereo-defined phosphorothioate linkage
  modified_base 13: mod_base = OTHER; note = Nucleotide with phosphorothioate linkage
  modified_base 14: mod_base = OTHER; note = Nucleotide with phosphorothioate linkage
  modified_base 15: mod_base = OTHER; note = Nucleotide with phosphorothioate linkage
  modified_base 16: mod_base = OTHER; note = 2'-O-methoxyethyl modified nucleotide with phosphorothioate linkage
  modified_base 17: mod_base = OTHER; note = 2'-O-methoxyethyl 5-methylcytosine with phosphorothioate linkage
  modified_base 18: mod_base = OTHER; note = 2'-O-methoxyethyl modified nucleotide with phosphorothioate linkage
  modified_base 19: mod_base = OTHER; note = 2'-O-methoxyethyl modified nucleotide with phosphorothioate linkage
  modified_base 20: mod_base = OTHER; note = 2'-O-methoxyethyl modified nucleotide
  misc_feature 1..5: note = RNA
  misc_feature 6..15: note = DNA
  misc_feature 16..20: note = RNA
acgtgcagaggtgaagcgaa

SEQ ID NO: 257 - DNA, 20 bp, synthetic construct
  source 1..20: mol_type = other DNA
  modified_base 1: mod_base = OTHER; note = 2'-O-methoxyethyl modified nucleotide with phosphorothioate linkage
  modified_base 2: mod_base = OTHER; note = 2'-O-methoxyethyl 5-methylcytosine with phosphorothioate linkage
  modified_base 3: mod_base = OTHER; note = 2'-O-methoxyethyl modified nucleotide with phosphorothioate linkage
  modified_base 4: mod_base = OTHER; note = 2'-O-methoxyethyl modified thymine with phosphorothioate linkage
  modified_base 5: mod_base = OTHER; note = 2'-O-methoxyethyl modified nucleotide with phosphorothioate linkage
  modified_base 6: mod_base = OTHER; note = 5-methylcytosine with phosphorothioate linkage
  modified_base 7: mod_base = OTHER; note = Nucleotide with phosphorothioate linkage
  modified_base 8: mod_base = OTHER; note = Nucleotide with phosphorothioate linkage
  modified_base 9: mod_base = OTHER; note = Nucleotide with phosphorothioate linkage
  modified_base 10: mod_base = OTHER; note = Nucleotide with phosphorothioate linkage
  modified_base 11: mod_base = OTHER; note = Nucleotide with phosphorothioate linkage
  modified_base 12: mod_base = OTHER; note = Thymine with phosphorothioate linkage
  modified_base 13: mod_base = OTHER; note = Nucleotide with S-stereo-defined phosphorothioate linkage
  modified_base 14: mod_base = OTHER; note = Nucleotide with phosphorothioate linkage
  modified_base 15: mod_base = OTHER; note = Nucleotide with phosphorothioate linkage
  modified_base 16: mod_base = OTHER; note = 2'-O-methoxyethyl modified nucleotide with phosphorothioate linkage
  modified_base 17: mod_base = OTHER; note = 2'-O-methoxyethyl 5-methylcytosine with phosphorothioate linkage
  modified_base 18: mod_base = OTHER; note = 2'-O-methoxyethyl modified nucleotide with phosphorothioate linkage
  modified_base 19: mod_base = OTHER; note = 2'-O-methoxyethyl modified nucleotide with phosphorothioate linkage
  modified_base 20: mod_base = OTHER; note = 2'-O-methoxyethyl modified nucleotide
  misc_feature 1..5: note = RNA
  misc_feature 6..15: note = DNA
  misc_feature 16..20: note = RNA
acgtgcagaggtgaagcgaa

SEQ ID NO: 258 - DNA, 20 bp, synthetic construct
  source 1..20: mol_type = other DNA
  modified_base 1: mod_base = OTHER; note = 2'-O-methoxyethyl modified nucleotide with phosphorothioate linkage
  modified_base 2: mod_base = OTHER; note = 2'-O-methoxyethyl 5-methylcytosine with phosphorothioate linkage
  modified_base 3: mod_base = OTHER; note = 2'-O-methoxyethyl modified nucleotide with phosphorothioate linkage
  modified_base 4: mod_base = OTHER; note = 2'-O-methoxyethyl modified thymine with phosphorothioate linkage
  modified_base 5: mod_base = OTHER; note = 2'-O-methoxyethyl modified nucleotide with phosphorothioate linkage
  modified_base 6: mod_base = OTHER; note = 5-methylcytosine with phosphorothioate linkage
  modified_base 7: mod_base = OTHER; note = Nucleotide with phosphorothioate linkage
  modified_base 8: mod_base = OTHER; note = Nucleotide with phosphorothioate linkage
  modified_base 9: mod_base = OTHER; note = Nucleotide with phosphorothioate linkage
  modified_base 10: mod_base = OTHER; note = Nucleotide with phosphorothioate linkage
  modified_base 11: mod_base = OTHER; note = Nucleotide with phosphorothioate linkage
  modified_base 12: mod_base = OTHER; note = Thymine with phosphorothioate linkage
  modified_base 13: mod_base = OTHER; note = Nucleotide with phosphorothioate linkage
  modified_base 14: mod_base = OTHER; note = Nucleotide with S-stereo-defined phosphorothioate linkage
  modified_base 15: mod_base = OTHER; note = Nucleotide with phosphorothioate linkage
  modified_base 16: mod_base = OTHER; note = 2'-O-methoxyethyl modified nucleotide with phosphorothioate linkage
  modified_base 17: mod_base = OTHER; note = 2'-O-methoxyethyl 5-methylcytosine with phosphorothioate linkage
  modified_base 18: mod_base = OTHER; note = 2'-O-methoxyethyl modified nucleotide with phosphorothioate linkage
  modified_base 19: mod_base = OTHER; note = 2'-O-methoxyethyl modified nucleotide with phosphorothioate linkage
  modified_base 20: mod_base = OTHER; note = 2'-O-methoxyethyl modified nucleotide
  misc_feature 1..5: note = RNA
  misc_feature 6..15: note = DNA
  misc_feature 16..20: note = RNA
acgtgcagaggtgaagcgaa

SEQ ID NO: 259 - DNA, 20 bp, synthetic construct
  source 1..20: mol_type = other DNA
  modified_base 1: mod_base = OTHER; note = 2'-O-methoxyethyl modified nucleotide with phosphorothioate linkage
  modified_base 2: mod_base = OTHER; note = 2'-O-methoxyethyl 5-methylcytosine with phosphorothioate linkage
  modified_base 3: mod_base = OTHER; note = 2'-O-methoxyethyl modified nucleotide with phosphorothioate linkage
  modified_base 4: mod_base = OTHER; note = 2'-O-methoxyethyl modified thymine with phosphorothioate linkage
  modified_base 5: mod_base = OTHER; note = 2'-O-methoxyethyl modified nucleotide with phosphorothioate linkage
  modified_base 6: mod_base = OTHER; note = 5-methylcytosine with phosphorothioate linkage
  modified_base 7: mod_base = OTHER; note = Nucleotide with phosphorothioate linkage
  modified_base 8: mod_base = OTHER; note = Nucleotide with phosphorothioate linkage
  modified_base 9: mod_base = OTHER; note = Nucleotide with phosphorothioate linkage
  modified_base 10: mod_base = OTHER; note = Nucleotide with phosphorothioate linkage
  modified_base 11: mod_base = OTHER; note = Nucleotide with phosphorothioate linkage
  modified_base 12: mod_base = OTHER; note = Thymine with phosphorothioate linkage
  modified_base 13: mod_base = OTHER; note = Nucleotide with phosphorothioate linkage
  modified_base 14: mod_base = OTHER; note = Nucleotide with phosphorothioate linkage
  modified_base 15: mod_base = OTHER; note = Nucleotide with S-stereo-defined phosphorothioate linkage
  modified_base 16: mod_base = OTHER; note = 2'-O-methoxyethyl modified nucleotide with phosphorothioate linkage
  modified_base 17: mod_base = OTHER; note = 2'-O-methoxyethyl 5-methylcytosine with phosphorothioate linkage
  modified_base 18: mod_base = OTHER; note = 2'-O-methoxyethyl modified nucleotide with phosphorothioate linkage
  modified_base 19: mod_base = OTHER; note = 2'-O-methoxyethyl modified nucleotide with phosphorothioate linkage
  modified_base 20: mod_base = OTHER; note = 2'-O-methoxyethyl modified nucleotide
  misc_feature 1..5: note = RNA
  misc_feature 6..15: note = DNA
  misc_feature 16..20: note = RNA
acgtgcagaggtgaagcgaa

SEQ ID NO: 260 - DNA, 20 bp, synthetic construct
  source 1..20: mol_type = other DNA
  modified_base 1: mod_base = OTHER; note = 2'-O-methoxyethyl modified nucleotide with phosphorothioate linkage
  modified_base 2: mod_base = OTHER; note = 2'-O-methoxyethyl 5-methylcytosine with phosphorothioate linkage
  modified_base 3: mod_base = OTHER; note = 2'-O-methoxyethyl modified nucleotide with phosphorothioate linkage
  modified_base 4: mod_base = OTHER; note = 2'-O-methoxyethyl modified thymine with phosphorothioate linkage
  modified_base 5: mod_base = OTHER; note = 2'-O-methoxyethyl modified nucleotide with phosphorothioate linkage
  modified_base 6: mod_base = OTHER; note = 5-methylcytosine with R-stereo-defined phosphorothioate linkage
  modified_base 7: mod_base = OTHER; note = Nucleotide with phosphorothioate linkage
  modified_base 8: mod_base = OTHER; note = Nucleotide with phosphorothioate linkage
  modified_base 9: mod_base = OTHER; note = Nucleotide with phosphorothioate linkage
  modified_base 10: mod_base = OTHER; note = Nucleotide with phosphorothioate linkage
  modified_base 11: mod_base = OTHER; note = Nucleotide with phosphorothioate linkage
  modified_base 12: mod_base = OTHER; note = Thymine with phosphorothioate linkage
  modified_base 13: mod_base = OTHER; note = Nucleotide with phosphorothioate linkage
  modified_base 14: mod_base = OTHER; note = Nucleotide with phosphorothioate linkage
  modified_base 15: mod_base = OTHER; note = Nucleotide with phosphorothioate linkage
  modified_base 16: mod_base = OTHER; note = 2'-O-methoxyethyl modified nucleotide with phosphorothioate linkage
  modified_base 17: mod_base = OTHER; note = 2'-O-methoxyethyl 5-methylcytosine with phosphorothioate linkage
  modified_base 18: mod_base = OTHER; note = 2'-O-methoxyethyl modified nucleotide with phosphorothioate linkage
  modified_base 19: mod_base = OTHER; note = 2'-O-methoxyethyl modified nucleotide with phosphorothioate linkage
  modified_base 20: mod_base = OTHER; note = 2'-O-methoxyethyl modified nucleotide
  misc_feature 1..5: note = RNA
  misc_feature 6..15: note = DNA
  misc_feature 16..20: note = RNA
acgtgcagaggtgaagcgaa

SEQ ID NO: 261 - DNA, 20 bp, synthetic construct
  source 1..20: mol_type = other DNA
  modified_base 1: mod_base = OTHER; note = 2'-O-methoxyethyl modified nucleotide with phosphorothioate linkage
  modified_base 2: mod_base = OTHER; note = 2'-O-methoxyethyl 5-methylcytosine with phosphorothioate linkage
  modified_base 3: mod_base = OTHER; note = 2'-O-methoxyethyl modified nucleotide with phosphorothioate linkage
  modified_base 4: mod_base = OTHER; note = 2'-O-methoxyethyl modified thymine with phosphorothioate linkage
  modified_base 5: mod_base = OTHER; note = 2'-O-methoxyethyl modified nucleotide with phosphorothioate linkage
  modified_base 6: mod_base = OTHER; note = 5-methylcytosine with phosphorothioate linkage
  modified_base 7: mod_base = OTHER; note = Nucleotide with R-stereo-defined phosphorothioate linkage
  modified_base 8: mod_base = OTHER; note = Nucleotide with phosphorothioate linkage
  modified_base 9: mod_base = OTHER; note = Nucleotide with phosphorothioate linkage
  modified_base 10: mod_base = OTHER; note = Nucleotide with phosphorothioate linkage
  modified_base 11: mod_base = OTHER; note = Nucleotide with phosphorothioate linkage
  modified_base 12: mod_base = OTHER; note = Thymine with phosphorothioate linkage
  modified_base 13: mod_base = OTHER; note = Nucleotide with phosphorothioate linkage
  modified_base 14: mod_base = OTHER; note = Nucleotide with phosphorothioate linkage
  modified_base 15: mod_base = OTHER; note = Nucleotide with phosphorothioate linkage
  modified_base 16: mod_base = OTHER; note = 2'-O-methoxyethyl modified nucleotide with phosphorothioate linkage
  modified_base 17: mod_base = OTHER; note = 2'-O-methoxyethyl 5-methylcytosine with phosphorothioate linkage
  modified_base 18: mod_base = OTHER; note = 2'-O-methoxyethyl modified nucleotide with phosphorothioate linkage
  modified_base 19: mod_base = OTHER; note = 2'-O-methoxyethyl modified nucleotide with phosphorothioate linkage
  modified_base 20: mod_base = OTHER; note = 2'-O-methoxyethyl modified nucleotide
  misc_feature 1..5: note = RNA
  misc_feature 6..15: note = DNA
  misc_feature 16..20: note = RNA
acgtgcagaggtgaagcgaa

SEQ ID NO: 262 - DNA, 20 bp, synthetic construct
  source 1..20: mol_type = other DNA
  modified_base 1: mod_base = OTHER; note = 2'-O-methoxyethyl modified nucleotide with phosphorothioate linkage
  modified_base 2: mod_base = OTHER; note = 2'-O-methoxyethyl 5-methylcytosine with phosphorothioate linkage
  modified_base 3: mod_base = OTHER; note = 2'-O-methoxyethyl modified nucleotide with phosphorothioate linkage
  modified_base 4: mod_base = OTHER; note = 2'-O-methoxyethyl modified thymine with phosphorothioate linkage
  modified_base 5: mod_base = OTHER; note = 2'-O-methoxyethyl modified nucleotide with phosphorothioate linkage
  modified_base 6: mod_base = OTHER; note = 5-methylcytosine with phosphorothioate linkage
  modified_base 7: mod_base = OTHER; note = Nucleotide with phosphorothioate linkage
  modified_base 8: mod_base = OTHER; note = Nucleotide with R-stereo-defined phosphorothioate linkage
  modified_base 9: mod_base = OTHER; note = Nucleotide with phosphorothioate linkage
  modified_base 10: mod_base = OTHER; note = Nucleotide with phosphorothioate linkage
  modified_base 11: mod_base = OTHER; note = Nucleotide with phosphorothioate linkage
  modified_base 12: mod_base = OTHER; note = Thymine with phosphorothioate linkage
  modified_base 13: mod_base = OTHER; note = Nucleotide with phosphorothioate linkage
  modified_base 14: mod_base = OTHER; note = Nucleotide with phosphorothioate linkage
  modified_base 15: mod_base = OTHER; note = Nucleotide with phosphorothioate linkage
  modified_base 16: mod_base = OTHER; note = 2'-O-methoxyethyl modified nucleotide with phosphorothioate linkage
  modified_base 17: mod_base = OTHER; note = 2'-O-methoxyethyl 5-methylcytosine with phosphorothioate linkage
  modified_base 18: mod_base = OTHER; note = 2'-O-methoxyethyl modified nucleotide with phosphorothioate linkage
  modified_base 19: mod_base = OTHER; note = 2'-O-methoxyethyl modified nucleotide with phosphorothioate linkage
  modified_base 20: mod_base = OTHER; note = 2'-O-methoxyethyl modified nucleotide
  misc_feature 1..5: note = RNA
  misc_feature 6..15: note = DNA
  misc_feature 16..20: note = RNA
acgtgcagaggtgaagcgaa

SEQ ID NO: 263 - DNA, 20 bp, synthetic construct
  source 1..20: mol_type = other DNA
  modified_base 1: mod_base = OTHER; note = 2'-O-methoxyethyl modified nucleotide with phosphorothioate linkage
  modified_base 2: mod_base = OTHER; note = 2'-O-methoxyethyl 5-methylcytosine with phosphorothioate linkage
  modified_base 3: mod_base = OTHER; note = 2'-O-methoxyethyl modified nucleotide with phosphorothioate linkage
  modified_base 4: mod_base = OTHER; note = 2'-O-methoxyethyl modified thymine with phosphorothioate linkage
  modified_base 5: mod_base = OTHER; note = 2'-O-methoxyethyl modified nucleotide with phosphorothioate linkage
  modified_base 6: mod_base = OTHER; note = 5-methylcytosine with phosphorothioate linkage
  modified_base 7: mod_base = OTHER; note = Nucleotide with phosphorothioate linkage
  modified_base 8: mod_base = OTHER; note = Nucleotide with phosphorothioate linkage
  modified_base 9: mod_base = OTHER; note = Nucleotide with R-stereo-defined phosphorothioate linkage
  modified_base 10: mod_base = OTHER; note = Nucleotide with phosphorothioate linkage
  modified_base 11: mod_base = OTHER; note = Nucleotide with phosphorothioate linkage
  modified_base 12: mod_base = OTHER; note = Thymine with phosphorothioate linkage
  modified_base 13: mod_base = OTHER; note = Nucleotide with phosphorothioate linkage
  modified_base 14: mod_base = OTHER; note = Nucleotide with phosphorothioate linkage
  modified_base 15: mod_base = OTHER; note = Nucleotide with phosphorothioate linkage
  modified_base 16: mod_base = OTHER; note = 2'-O-methoxyethyl modified nucleotide with phosphorothioate linkage
  modified_base 17: mod_base = OTHER; note = 2'-O-methoxyethyl 5-methylcytosine with phosphorothioate linkage
  modified_base 18: mod_base = OTHER; note = 2'-O-methoxyethyl modified nucleotide with phosphorothioate linkage
  modified_base 19: mod_base = OTHER; note = 2'-O-methoxyethyl modified nucleotide with phosphorothioate linkage
  modified_base 20: mod_base = OTHER; note = 2'-O-methoxyethyl modified nucleotide
  misc_feature 1..5: note = RNA
  misc_feature 6..15: note = DNA
  misc_feature 16..20: note = RNA
acgtgcagaggtgaagcgaa

SEQ ID NO: 264 - DNA, 20 bp, synthetic construct
  source 1..20: mol_type = other DNA
  modified_base 1: mod_base = OTHER; note = 2'-O-methoxyethyl modified nucleotide with phosphorothioate linkage
  modified_base 2: mod_base = OTHER; note = 2'-O-methoxyethyl 5-methylcytosine with phosphorothioate linkage
  modified_base 3: mod_base = OTHER; note = 2'-O-methoxyethyl modified nucleotide with phosphorothioate linkage
  modified_base 4: mod_base = OTHER; note = 2'-O-methoxyethyl modified thymine with phosphorothioate linkage
  modified_base 5: mod_base = OTHER; note = 2'-O-methoxyethyl modified nucleotide with phosphorothioate linkage
  modified_base 6: mod_base = OTHER; note = 5-methylcytosine with phosphorothioate linkage
  modified_base 7: mod_base = OTHER; note = Nucleotide with phosphorothioate linkage
  modified_base 8: mod_base = OTHER; note = Nucleotide with phosphorothioate linkage
  modified_base 9: mod_base = OTHER; note = Nucleotide with phosphorothioate linkage
  modified_base 10: mod_base = OTHER; note = Nucleotide with R-stereo-defined phosphorothioate linkage
  modified_base 11: mod_base = OTHER; note = Nucleotide with phosphorothioate linkage
  modified_base 12: mod_base = OTHER; note = Thymine with phosphorothioate linkage
  modified_base 13: mod_base = OTHER; note = Nucleotide with phosphorothioate linkage
  modified_base 14: mod_base = OTHER; note = Nucleotide with phosphorothioate linkage
  modified_base 15: mod_base = OTHER; note = Nucleotide with phosphorothioate linkage
  modified_base 16: mod_base = OTHER; note = 2'-O-methoxyethyl modified nucleotide with phosphorothioate linkage
  modified_base 17: mod_base = OTHER; note = 2'-O-methoxyethyl 5-methylcytosine with phosphorothioate linkage
  modified_base 18: mod_base = OTHER; note = 2'-O-methoxyethyl modified nucleotide with phosphorothioate linkage
  modified_base 19: mod_base = OTHER; note = 2'-O-methoxyethyl modified nucleotide with phosphorothioate linkage
  modified_base 20: mod_base = OTHER; note = 2'-O-methoxyethyl modified nucleotide
  misc_feature 1..5: note = RNA
  misc_feature 6..15: note = DNA
  misc_feature 16..20: note = RNA
acgtgcagaggtgaagcgaa

SEQ ID NO: 265 - DNA, 20 bp, synthetic construct
  source 1..20: mol_type = other DNA
  modified_base 1: mod_base = OTHER; note = 2'-O-methoxyethyl modified nucleotide with phosphorothioate linkage
  modified_base 2: mod_base = OTHER; note = 2'-O-methoxyethyl 5-methylcytosine with phosphorothioate linkage
  modified_base 3: mod_base = OTHER; note = 2'-O-methoxyethyl modified nucleotide with phosphorothioate linkage
  modified_base 4: mod_base = OTHER; note = 2'-O-methoxyethyl modified thymine with phosphorothioate linkage
  modified_base 5: mod_base = OTHER; note = 2'-O-methoxyethyl modified nucleotide with phosphorothioate linkage
  modified_base 6: mod_base = OTHER; note = 5-methylcytosine with phosphorothioate linkage
  modified_base 7: mod_base = OTHER; note = Nucleotide with phosphorothioate linkage
  modified_base 8: mod_base = OTHER; note = Nucleotide with phosphorothioate linkage
  modified_base 9: mod_base = OTHER; note = Nucleotide with phosphorothioate linkage
  modified_base 10: mod_base = OTHER; note = Nucleotide with phosphorothioate linkage
  modified_base 11: mod_base = OTHER; note = Nucleotide with R-stereo-defined phosphorothioate linkage
  modified_base 12: mod_base = OTHER; note = Thymine with phosphorothioate linkage
  modified_base 13: mod_base = OTHER; note = Nucleotide with phosphorothioate linkage
  modified_base 14: mod_base = OTHER; note = Nucleotide with phosphorothioate linkage
  modified_base 15: mod_base = OTHER; note = Nucleotide with phosphorothioate linkage
  modified_base 16: mod_base = OTHER; note = 2'-O-methoxyethyl modified nucleotide with phosphorothioate linkage
  modified_base 17: mod_base = OTHER; note = 2'-O-methoxyethyl 5-methylcytosine with phosphorothioate linkage
  modified_base 18: mod_base = OTHER; note = 2'-O-methoxyethyl modified nucleotide with phosphorothioate linkage
  modified_base 19: mod_base = OTHER; note = 2'-O-methoxyethyl modified nucleotide with phosphorothioate linkage
  modified_base 20: mod_base = OTHER; note = 2'-O-methoxyethyl modified nucleotide
  misc_feature 1..5: note = RNA
  misc_feature 6..15: note = DNA
  misc_feature 16..20: note = RNA
acgtgcagaggtgaagcgaa

SEQ ID NO: 266 - DNA, 20 bp, synthetic construct
  source 1..20: mol_type = other DNA
  modified_base 1: mod_base = OTHER; note = 2'-O-methoxyethyl modified nucleotide with phosphorothioate linkage
  modified_base 2: mod_base = OTHER; note = 2'-O-methoxyethyl 5-methylcytosine with phosphorothioate linkage
  modified_base 3: mod_base = OTHER; note = 2'-O-methoxyethyl modified nucleotide with phosphorothioate linkage
  modified_base 4: mod_base = OTHER; note = 2'-O-methoxyethyl modified thymine with phosphorothioate linkage
  modified_base 5: mod_base = OTHER; note = 2'-O-methoxyethyl modified nucleotide with phosphorothioate linkage
  modified_base 6: mod_base = OTHER; note = 5-methylcytosine with phosphorothioate linkage
  modified_base 7: mod_base = OTHER; note = Nucleotide with phosphorothioate linkage
  modified_base 8: mod_base = OTHER; note = Nucleotide with phosphorothioate linkage
  modified_base 9: mod_base = OTHER; note = Nucleotide with phosphorothioate linkage
  modified_base 10: mod_base = OTHER; note = Nucleotide with phosphorothioate linkage
  modified_base 11: mod_base = OTHER; note = Nucleotide with phosphorothioate linkage
  modified_base 12: mod_base = OTHER; note = Thymine with R-stereo-defined phosphorothioate linkage
  modified_base 13: mod_base = OTHER; note = Nucleotide with phosphorothioate linkage
  modified_base 14: mod_base = OTHER; note = Nucleotide with phosphorothioate linkage
  modified_base 15: mod_base = OTHER; note = Nucleotide with phosphorothioate linkage
  modified_base 16: mod_base = OTHER; note = 2'-O-methoxyethyl modified nucleotide with phosphorothioate linkage
  modified_base 17: mod_base = OTHER; note = 2'-O-methoxyethyl 5-methylcytosine with phosphorothioate linkage
  modified_base 18: mod_base = OTHER; note = 2'-O-methoxyethyl modified nucleotide with phosphorothioate linkage
  modified_base 19: mod_base = OTHER; note = 2'-O-methoxyethyl modified nucleotide with phosphorothioate linkage
  modified_base 20: mod_base = OTHER; note = 2'-O-methoxyethyl modified nucleotide
  misc_feature 1..5: note = RNA
  misc_feature 6..15: note = DNA
  misc_feature 16..20: note = RNA
acgtgcagaggtgaagcgaa

SEQ ID NO: 267 - DNA, 20 bp, synthetic construct
  source 1..20: mol_type = other DNA
  modified_base 1: mod_base = OTHER; note = 2'-O-methoxyethyl modified nucleotide with phosphorothioate linkage
  modified_base 2: mod_base = OTHER; note = 2'-O-methoxyethyl 5-methylcytosine with phosphorothioate linkage
  modified_base 3: mod_base = OTHER; note = 2'-O-methoxyethyl modified nucleotide with phosphorothioate linkage
  modified_base 4: mod_base = OTHER; note = 2'-O-methoxyethyl modified thymine with phosphorothioate linkage
  modified_base 5: mod_base = OTHER; note = 2'-O-methoxyethyl modified nucleotide with phosphorothioate linkage
  modified_base 6: mod_base = OTHER; note = 5-methylcytosine with phosphorothioate linkage
  modified_base 7: mod_base = OTHER; note = Nucleotide with phosphorothioate linkage
  modified_base 8: mod_base = OTHER; note = Nucleotide with phosphorothioate linkage
  modified_base 9: mod_base = OTHER; note = Nucleotide with phosphorothioate linkage
  modified_base 10: mod_base = OTHER; note = Nucleotide with phosphorothioate linkage
  modified_base 11: mod_base = OTHER; note = Nucleotide with phosphorothioate linkage
  modified_base 12: mod_base = OTHER; note = Thymine with phosphorothioate linkage
  modified_base 13: mod_base = OTHER; note = Nucleotide with R-stereo-defined phosphorothioate linkage
  modified_base 14: mod_base = OTHER; note = Nucleotide with phosphorothioate linkage
  modified_base 15: mod_base = OTHER; note = Nucleotide with phosphorothioate linkage
  modified_base 16: mod_base = OTHER; note = 2'-O-methoxyethyl modified nucleotide with phosphorothioate linkage
  modified_base 17: mod_base = OTHER; note = 2'-O-methoxyethyl 5-methylcytosine with phosphorothioate linkage
  modified_base 18: mod_base = OTHER; note = 2'-O-methoxyethyl modified nucleotide with phosphorothioate linkage
  modified_base 19: mod_base = OTHER; note = 2'-O-methoxyethyl modified nucleotide with phosphorothioate linkage
  modified_base 20: mod_base = OTHER; note = 2'-O-methoxyethyl modified nucleotide
  misc_feature 1..5: note = RNA
  misc_feature 6..15: note = DNA
  misc_feature 16..20: note = RNA
acgtgcagaggtgaagcgaa

SEQ ID NO: 268 - DNA, 20 bp, synthetic construct
  source 1..20: mol_type = other DNA
  modified_base 1: mod_base = OTHER; note = 2'-O-methoxyethyl modified nucleotide with phosphorothioate linkage
  modified_base 2: mod_base = OTHER; note = 2'-O-methoxyethyl 5-methylcytosine with phosphorothioate linkage
  modified_base 3: mod_base = OTHER; note = 2'-O-methoxyethyl modified nucleotide with phosphorothioate linkage
  modified_base 4: mod_base = OTHER; note = 2'-O-methoxyethyl modified thymine with phosphorothioate linkage
  modified_base 5: mod_base = OTHER; note = 2'-O-methoxyethyl modified nucleotide with phosphorothioate linkage
  modified_base 6: mod_base = OTHER; note = 5-methylcytosine with phosphorothioate linkage
  modified_base 7: mod_base = OTHER; note = Nucleotide with phosphorothioate linkage
  modified_base 8: mod_base = OTHER; note = Nucleotide with phosphorothioate linkage
  modified_base 9: mod_base = OTHER; note = Nucleotide with phosphorothioate linkage
  modified_base 10: mod_base = OTHER; note = Nucleotide with phosphorothioate linkage
  modified_base 11: mod_base = OTHER; note = Nucleotide with phosphorothioate linkage
  modified_base 12: mod_base = OTHER; note = Thymine with phosphorothioate linkage
  modified_base 13: mod_base = OTHER; note = Nucleotide with phosphorothioate linkage
  modified_base 14: mod_base = OTHER; note = Nucleotide with R-stereo-defined phosphorothioate linkage
  modified_base 15: mod_base = OTHER; note = Nucleotide with phosphorothioate linkage
  modified_base 16: mod_base = OTHER; note = 2'-O-methoxyethyl modified nucleotide with phosphorothioate linkage
  modified_base 17: mod_base = OTHER; note = 2'-O-methoxyethyl 5-methylcytosine with phosphorothioate linkage
  modified_base 18: mod_base = OTHER; note = 2'-O-methoxyethyl modified nucleotide with phosphorothioate linkage
  modified_base 19: mod_base = OTHER; note = 2'-O-methoxyethyl modified nucleotide with phosphorothioate linkage
  modified_base 20: mod_base = OTHER; note = 2'-O-methoxyethyl modified nucleotide
  misc_feature 1..5: note = RNA
  misc_feature 6..15: note = DNA
  misc_feature 16..20: note = RNA
acgtgcagaggtgaagcgaa

SEQ ID NO: 269 - DNA, 20 bp, synthetic construct
  source 1..20: mol_type = other DNA
  modified_base 1: mod_base = OTHER; note = 2'-O-methoxyethyl modified nucleotide with phosphorothioate linkage
  modified_base 2: mod_base = OTHER; note = 2'-O-methoxyethyl 5-methylcytosine with phosphorothioate linkage
  modified_base 3: mod_base = OTHER; note = 2'-O-methoxyethyl modified nucleotide with phosphorothioate linkage
  modified_base 4: mod_base = OTHER; note = 2'-O-methoxyethyl modified thymine with phosphorothioate linkage
  modified_base 5: mod_base = OTHER; note = 2'-O-methoxyethyl modified nucleotide with phosphorothioate linkage
  modified_base 6: mod_base = OTHER; note = 5-methylcytosine with phosphorothioate linkage
  modified_base 7: mod_base = OTHER; note = Nucleotide with phosphorothioate linkage
  modified_base 8: mod_base = OTHER; note = Nucleotide with phosphorothioate linkage
  modified_base 9: mod_base = OTHER; note = Nucleotide with phosphorothioate linkage
  modified_base 10: mod_base = OTHER; note = Nucleotide with phosphorothioate linkage
  modified_base 11: mod_base = OTHER; note = Nucleotide with phosphorothioate linkage
  modified_base 12: mod_base = OTHER; note = Thymine with phosphorothioate linkage
  modified_base 13: mod_base = OTHER; note = Nucleotide with phosphorothioate linkage
  modified_base 14: mod_base = OTHER; note = Nucleotide with phosphorothioate linkage
  modified_base 15: mod_base = OTHER; note = Nucleotide with R-stereo-defined phosphorothioate linkage
  modified_base 16: mod_base = OTHER; note = 2'-O-methoxyethyl modified nucleotide with phosphorothioate linkage
  modified_base 17: mod_base = OTHER; note = 2'-O-methoxyethyl 5-methylcytosine with phosphorothioate linkage
  modified_base 18: mod_base = OTHER; note = 2'-O-methoxyethyl modified nucleotide with phosphorothioate linkage
  modified_base 19: mod_base = OTHER; note = 2'-O-methoxyethyl modified nucleotide with phosphorothioate linkage
  modified_base 20: mod_base = OTHER; note = 2'-O-methoxyethyl modified nucleotide
  misc_feature 1..5: note = RNA
  misc_feature 6..15: note = DNA
  misc_feature 16..20: note = RNA
acgtgcagaggtgaagcgaa

SEQ ID NO: 270 - DNA, 20 bp, synthetic construct
  source 1..20: mol_type = other DNA
  modified_base 1: mod_base = OTHER; note = 2'-O-methoxyethyl 5-methylcytosine with phosphorothioate linkage
  modified_base 2: mod_base = OTHER; note = 2'-O-methoxyethyl modified nucleotide with phosphorothioate linkage
  modified_base 3: mod_base = OTHER; note = Locked nucleic acid with phosphorothioate linkage
  modified_base 4: mod_base = OTHER; note = 2'-O-methoxyethyl modified nucleotide with phosphorothioate linkage
  modified_base 5: mod_base = OTHER; note = Locked nucleic acid with phosphorothioate linkage
  modified_base 6: mod_base = OTHER; note = Nucleotide with phosphorothioate linkage
  modified_base 7: mod_base = OTHER; note = Thymine with phosphorothioate linkage
  modified_base 8: mod_base = OTHER; note = Nucleotide with phosphorothioate linkage
  modified_base 9: mod_base = OTHER; note = Nucleotide with phosphorothioate linkage
  modified_base 10: mod_base = OTHER; note = Nucleotide with phosphorothioate linkage
  modified_base 11: mod_base = OTHER; note = Nucleotide with phosphorothioate linkage
  modified_base 12: mod_base = OTHER; note = 5-methylcytosine with phosphorothioate linkage
  modified_base 13: mod_base = OTHER; note = Nucleotide with phosphorothioate linkage
  modified_base 14: mod_base = OTHER; note = Nucleotide with phosphorothioate linkage
  modified_base 15: mod_base = OTHER; note = Nucleotide with phosphorothioate linkage
  modified_base 16: mod_base = OTHER; note = 2'-O-methoxyethyl modified nucleotide with phosphorothioate linkage
  modified_base 17: mod_base = OTHER; note = 2'-O-methoxyethyl modified thymine with phosphorothioate linkage
  modified_base 18: mod_base = OTHER; note = Locked nucleic acid with phosphorothioate linkage
  modified_base 19: mod_base = OTHER; note = 2'-O-methyl 5-methylcytosine with phosphorothioate linkage
  modified_base 20: mod_base = OTHER; note = 2'-O-methyl modified nucleotide
  misc_feature 1..5: note = RNA
  misc_feature 6..15: note = DNA
  misc_feature 16..20: note = RNA
cagaggtgaagcgaagtgca

SEQ ID NO: 271 - DNA, 20 bp, synthetic construct
  source 1..20: mol_type = other DNA
  modified_base 1: mod_base = OTHER; note = 2'-O-methoxyethyl 5-methylcytosine with phosphorothioate linkage
  modified_base 2: mod_base = OTHER; note = 2'-O-methoxyethyl modified nucleotide with phosphorothioate linkage
  modified_base 3: mod_base = OTHER; note = 2'-O-methoxyethyl modified nucleotide with phosphorothioate linkage
  modified_base 4: mod_base = OTHER; note = 2'-O-methoxyethyl modified nucleotide with phosphorothioate linkage
  modified_base 5: mod_base = OTHER; note = Locked nucleic acid with phosphorothioate linkage
  modified_base 6: mod_base = OTHER; note = Nucleotide with phosphorothioate linkage
  modified_base 7: mod_base = OTHER; note = Thymine with phosphorothioate linkage
  modified_base 8: mod_base = OTHER; note = Nucleotide with phosphorothioate linkage
  modified_base 9: mod_base = OTHER; note = Nucleotide with phosphorothioate linkage
  modified_base 10: mod_base = OTHER; note = Nucleotide with phosphorothioate linkage
  modified_base 11: mod_base = OTHER; note = Nucleotide with phosphorothioate linkage
  modified_base 12: mod_base = OTHER; note = 5-methylcytosine with phosphorothioate linkage
  modified_base 13: mod_base = OTHER; note = Nucleotide with phosphorothioate linkage
  modified_base 14: mod_base = OTHER; note = Nucleotide with phosphorothioate linkage
  modified_base 15: mod_base = OTHER; note = Nucleotide with phosphorothioate linkage
  modified_base 16: mod_base = OTHER; note = 2'-O-methoxyethyl modified nucleotide with phosphorothioate linkage
  modified_base 17: mod_base = OTHER; note = 2'-O-methoxyethyl modified thymine with phosphorothioate linkage
  modified_base 18: mod_base = OTHER; note = Locked nucleic acid with phosphorothioate linkage
  modified_base 19: mod_base = OTHER; note = 2'-O-methyl 5-methylcytosine with phosphorothioate linkage
  modified_base 20: mod_base = OTHER; note = 2'-O-methyl modified nucleotide
  misc_feature 1..5: note = RNA
  misc_feature 6..15: note = DNA
  misc_feature 16..20: note = RNA
cagaggtgaagcgaagtgca

SEQ ID NO: 272 - DNA, 20 bp, synthetic construct
  source 1..20: mol_type = other DNA
  modified_base 1: mod_base = OTHER; note = 2'-O-methoxyethyl 5-methylcytosine with phosphorothioate linkage
  modified_base 2: mod_base = OTHER; note = 2'-O-methoxyethyl modified nucleotide with phosphorothioate linkage
  modified_base 3: mod_base = OTHER; note = Locked nucleic acid with phosphorothioate linkage
  modified_base 4: mod_base = OTHER; note = 2'-O-methoxyethyl modified nucleotide with phosphorothioate linkage
  modified_base 5: mod_base = OTHER; note = 2'-O-methoxyethyl modified nucleotide with phosphorothioate linkage
  modified_base 6: mod_base = OTHER; note = Nucleotide with phosphorothioate linkage
  modified_base 7: mod_base = OTHER; note = Thymine with phosphorothioate linkage
  modified_base 8: mod_base = OTHER; note = Nucleotide with phosphorothioate linkage
  modified_base 9: mod_base = OTHER; note = Nucleotide with phosphorothioate linkage
  modified_base 10: mod_base = OTHER; note = Nucleotide with phosphorothioate linkage
  modified_base 11: mod_base = OTHER; note = Nucleotide with phosphorothioate linkage
  modified_base 12: mod_base = OTHER; note = 5-methylcytosine with phosphorothioate linkage
  modified_base 13: mod_base = OTHER; note = Nucleotide with phosphorothioate linkage
  modified_base 14: mod_base = OTHER; note = Nucleotide with phosphorothioate linkage
  modified_base 15: mod_base = OTHER; note = Nucleotide with phosphorothioate linkage
  modified_base 16: mod_base = OTHER; note = 2'-O-methoxyethyl modified nucleotide with phosphorothioate linkage
  modified_base 17: mod_base = OTHER; note = 2'-O-methoxyethyl modified thymine with phosphorothioate linkage
  modified_base 18: mod_base = OTHER; note = Locked nucleic acid with phosphorothioate linkage
  modified_base 19: mod_base = OTHER; note = 2'-O-methyl 5-methylcytosine with phosphorothioate linkage
  modified_base 20: mod_base = OTHER; note = 2'-O-methyl modified nucleotide
  misc_feature 1..5: note = RNA
  misc_feature 6..15: note = DNA
  misc_feature 16..20: note = RNA
cagaggtgaagcgaagtgca

SEQ ID NO: 273 - DNA, 20 bp, synthetic construct
  source 1..20: mol_type = other DNA
  modified_base 1: mod_base = OTHER; note = 2'-O-methoxyethyl 5-methylcytosine with phosphorothioate linkage
  modified_base 2: mod_base = OTHER; note = 2'-O-methoxyethyl modified nucleotide with phosphorothioate linkage
  modified_base 3: mod_base = OTHER; note = 2'-O-methoxyethyl modified nucleotide with phosphorothioate linkage
  modified_base 4: mod_base = OTHER; note = 2'-O-methoxyethyl modified nucleotide with phosphorothioate linkage
  modified_base 5: mod_base = OTHER; note = 2'-O-methoxyethyl modified nucleotide with phosphorothioate linkage
  modified_base 6: mod_base = OTHER; note = Nucleotide with phosphorothioate linkage
  modified_base 7: mod_base = OTHER; note = Thymine with phosphorothioate linkage
  modified_base 8: mod_base = OTHER; note = Nucleotide with phosphorothioate linkage
  modified_base 9: mod_base = OTHER; note = Nucleotide with phosphorothioate linkage
  modified_base 10: mod_base = OTHER; note = Nucleotide with phosphorothioate linkage
  modified_base 11: mod_base = OTHER; note = Nucleotide with phosphorothioate linkage
  modified_base 12: mod_base = OTHER; note = 5-methylcytosine with phosphorothioate linkage
  modified_base 13: mod_base = OTHER; note = Nucleotide with phosphorothioate linkage
  modified_base 14: mod_base = OTHER; note = Nucleotide with phosphorothioate linkage
  modified_base 15: mod_base = OTHER; note = Nucleotide with phosphorothioate linkage
  modified_base 16: mod_base = OTHER; note = 2'-O-methoxyethyl modified nucleotide with phosphorothioate linkage
  modified_base 17: mod_base = OTHER; note = 2'-O-methoxyethyl modified thymine with phosphorothioate linkage
  modified_base 18: mod_base = OTHER; note = Locked nucleic acid with phosphorothioate linkage
  modified_base 19: mod_base = OTHER; note = 2'-O-methyl 5-methylcytosine with phosphorothioate linkage
  modified_base 20: mod_base = OTHER; note = 2'-O-methyl modified nucleotide
  misc_feature 1..5: note = RNA
  misc_feature 6..15: note = DNA
  misc_feature 16..20: note = RNA
cagaggtgaagcgaagtgca

SEQ ID NO: 274 - DNA, 20 bp, synthetic construct
  source 1..20: mol_type = other DNA
  modified_base 1: mod_base = OTHER; note = 2'-O-methoxyethyl 5-methylcytosine with phosphorothioate linkage
  modified_base 2: mod_base = OTHER; note = 2'-O-methoxyethyl modified nucleotide with phosphorothioate linkage
  modified_base 3: mod_base = OTHER; note = Locked nucleic acid with phosphorothioate linkage
  modified_base 4: mod_base = OTHER; note = 2'-O-methoxyethyl modified nucleotide with phosphorothioate linkage
  modified_base 5: mod_base = OTHER; note = Locked nucleic acid with phosphorothioate linkage
  modified_base 6: mod_base = OTHER; note = Nucleotide with phosphorothioate linkage
  modified_base 7: mod_base = OTHER; note = Thymine with phosphorothioate linkage
  modified_base 8: mod_base = OTHER; note = Nucleotide with phosphorothioate linkage
  modified_base 9: mod_base = OTHER; note = Nucleotide with phosphorothioate linkage
  modified_base 10: mod_base = OTHER; note = Nucleotide with phosphorothioate linkage
  modified_base 11: mod_base = OTHER; note = Nucleotide with phosphorothioate linkage
  modified_base 12: mod_base = OTHER; note = 5-methylcytosine with phosphorothioate linkage
  modified_base 13: mod_base = OTHER; note = Nucleotide with phosphorothioate linkage
  modified_base 14: mod_base = OTHER; note = Nucleotide with phosphorothioate linkage
  modified_base 15: mod_base = OTHER; note = Nucleotide with phosphorothioate linkage
  modified_base 16: mod_base = OTHER; note = 2'-O-methoxyethyl modified nucleotide with phosphorothioate linkage
  modified_base 17: mod_base = OTHER; note = 2'-O-methoxyethyl modified thymine with phosphorothioate linkage
  modified_base 18: mod_base = OTHER; note = 2'-O-methyl modified nucleotide with phosphorothioate linkage
  modified_base 19: mod_base = OTHER; note = 2'-O-methyl 5-methylcytosine with phosphorothioate linkage
  modified_base 20: mod_base = OTHER; note = 2'-O-methyl modified nucleotide
  misc_feature 1..5: note = RNA
  misc_feature 6..15: note = DNA
  misc_feature 16..20: note = RNA
cagaggtgaagcgaagtgca

SEQ ID NO: 275 - DNA, 20 bp, synthetic construct
  source 1..20: mol_type = other DNA
  modified_base 1: mod_base = OTHER; note = 2'-O-methoxyethyl 5-methylcytosine with phosphorothioate linkage
  modified_base 2: mod_base = OTHER; note = 2'-O-methoxyethyl modified nucleotide with phosphorothioate linkage
  modified_base 3: mod_base = OTHER; note = 2'-O-methoxyethyl modified nucleotide with phosphorothioate linkage
  modified_base 4: mod_base = OTHER; note = 2'-O-methoxyethyl modified nucleotide with phosphorothioate linkage
  modified_base 5: mod_base = OTHER; note = Locked nucleic acid with phosphorothioate linkage
  modified_base 6: mod_base = OTHER; note = Nucleotide with phosphorothioate linkage
  modified_base 7: mod_base = OTHER; note = Thymine with phosphorothioate linkage
  modified_base 8: mod_base = OTHER; note = Nucleotide with phosphorothioate linkage
  modified_base 9: mod_base = OTHER; note = Nucleotide with phosphorothioate linkage
  modified_base 10: mod_base = OTHER; note = Nucleotide with phosphorothioate linkage
  modified_base 11: mod_base = OTHER; note = Nucleotide with phosphorothioate linkage
  modified_base 12: mod_base = OTHER; note = 5-methylcytosine with phosphorothioate linkage
  modified_base 13: mod_base = OTHER; note = Nucleotide with phosphorothioate linkage
  modified_base 14: mod_base = OTHER; note = Nucleotide with phosphorothioate linkage
  modified_base 15: mod_base = OTHER; note = Nucleotide with phosphorothioate linkage
  modified_base 16: mod_base = OTHER; note = 2'-O-methoxyethyl modified nucleotide with phosphorothioate linkage
  modified_base 17: mod_base = OTHER; note = 2'-O-methoxyethyl modified thymine with phosphorothioate linkage
  modified_base 18: mod_base = OTHER; note = 2'-O-methyl modified nucleotide with phosphorothioate linkage
  modified_base 19: mod_base = OTHER; note = 2'-O-methyl 5-methylcytosine with phosphorothioate linkage
  modified_base 20: mod_base = OTHER; note = 2'-O-methyl modified nucleotide
  misc_feature 1..5: note = RNA
  misc_feature 6..15: note = DNA
  misc_feature 16..20: note = RNA
cagaggtgaagcgaagtgca

SEQ ID NO: 276 - DNA, 20 bp, synthetic construct
  source 1..20: mol_type = other DNA
  modified_base 1: mod_base = OTHER; note = 2'-O-methoxyethyl 5-methylcytosine with phosphorothioate linkage
  modified_base 2: mod_base = OTHER; note = 2'-O-methoxyethyl modified nucleotide with phosphorothioate linkage
  modified_base 3: mod_base = OTHER; note = Locked nucleic acid with phosphorothioate linkage
  modified_base 4: mod_base = OTHER; note = 2'-O-methoxyethyl modified nucleotide with phosphorothioate linkage
  modified_base 5: mod_base = OTHER; note = 2'-O-methoxyethyl modified nucleotide with phosphorothioate linkage
  modified_base 6: mod_base = OTHER; note = Nucleotide with phosphorothioate linkage
  modified_base 7: mod_base = OTHER; note = Thymine with phosphorothioate linkage
  modified_base 8: mod_base = OTHER; note = Nucleotide with phosphorothioate linkage
  modified_base 9: mod_base = OTHER; note = Nucleotide with phosphorothioate linkage
  modified_base 10: mod_base = OTHER; note = Nucleotide with phosphorothioate linkage
  modified_base 11: mod_base = OTHER; note = Nucleotide with phosphorothioate linkage
  modified_base 12: mod_base = OTHER; note = 5-methylcytosine with phosphorothioate linkage
  modified_base 13: mod_base = OTHER; note = Nucleotide with phosphorothioate linkage
  modified_base 14: mod_base = OTHER; note = Nucleotide with phosphorothioate linkage
  modified_base 15: mod_base = OTHER; note = Nucleotide with phosphorothioate linkage
  modified_base 16: mod_base = OTHER; note = 2'-O-methoxyethyl modified nucleotide with phosphorothioate linkage
  modified_base 17: mod_base = OTHER; note = 2'-O-methoxyethyl modified thymine with phosphorothioate linkage
  modified_base 18: mod_base = OTHER; note = 2'-O-methyl modified nucleotide with phosphorothioate linkage
  modified_base 19: mod_base = OTHER; note = 2'-O-methyl 5-methylcytosine with phosphorothioate linkage
  modified_base 20: mod_base = OTHER; note = 2'-O-methyl modified nucleotide
  misc_feature 1..5: note = RNA
  misc_feature 6..15: note = DNA
  misc_feature 16..20: note = RNA
cagaggtgaagcgaagtgca

SEQ ID NO: 277 - RNA, 20 nt, synthetic construct
  source 1..20: mol_type = other RNA
gcccgtctgttgtgtgactc

SEQ ID NO: 278 - DNA, 20 bp, synthetic construct
  source 1..20: mol_type = other DNA
  modified_base 1: mod_base = OTHER; note = 2'-O-methoxyethyl 5-methylcytosine with phosphorothioate linkage
  modified_base 2: mod_base = OTHER; note = 2'-O-methoxyethyl modified nucleotide with phosphorothioate linkage
  modified_base 3: mod_base = OTHER; note = Locked nucleic acid with phosphorothioate linkage
  modified_base 4: mod_base = OTHER; note = 2'-O-methoxyethyl modified nucleotide with phosphorothioate linkage
  modified_base 5: mod_base = OTHER; note = 2'-O-methoxyethyl modified nucleotide with phosphorothioate linkage
  modified_base 6: mod_base = OTHER; note = Nucleotide with phosphorothioate linkage
  modified_base 7: mod_base = OTHER; note = Thymine with phosphorothioate linkage
  modified_base 8: mod_base = OTHER; note = Nucleotide with phosphorothioate linkage
  modified_base 9: mod_base = OTHER; note = Nucleotide with phosphorothioate linkage
  modified_base 10: mod_base = OTHER; note = Nucleotide with phosphorothioate linkage
  modified_base 11: mod_base = OTHER; note = Nucleotide with phosphorothioate linkage
  modified_base 12: mod_base = OTHER; note = 5-methylcytosine with phosphorothioate linkage
  modified_base 13: mod_base = OTHER; note = Nucleotide with phosphorothioate linkage
  modified_base 14: mod_base = OTHER; note = Nucleotide with phosphorothioate linkage
  modified_base 15: mod_base = OTHER; note = Nucleotide with phosphorothioate linkage
  modified_base 16: mod_base = OTHER; note = 2'-O-methyl modified nucleotide with phosphorothioate linkage
  modified_base 17: mod_base = OTHER; note = 2'-O-methoxyethyl modified thymine with phosphorothioate linkage
  modified_base 18: mod_base = OTHER; note = 2'-O-methyl modified nucleotide with phosphorothioate linkage
  modified_base 19: mod_base = OTHER; note = 2'-O-methoxyethyl 5-methylcytosine with phosphorothioate linkage
  modified_base 20: mod_base = OTHER; note = 2'-O-methyl modified nucleotide
  misc_feature 1..5: note = RNA
  misc_feature 6..15: note = DNA
  misc_feature 16..20: note = RNA
cagaggtgaagcgaagtgca

SEQ ID NO: 279 - DNA, 20 bp, synthetic construct
  source 1..20: mol_type = other DNA
  modified_base 1: mod_base = OTHER; note = 2'-O-methoxyethyl 5-methylcytosine with phosphorothioate linkage
  modified_base 2: mod_base = OTHER; note = 2'-O-methoxyethyl modified nucleotide with phosphorothioate linkage
  modified_base 3: mod_base = OTHER; note = 2'-O-methoxyethyl modified nucleotide with phosphorothioate linkage
  modified_base 4: mod_base = OTHER; note = 2'-O-methoxyethyl modified nucleotide with phosphorothioate linkage
  modified_base 5: mod_base = OTHER; note = Locked nucleic acid with phosphorothioate linkage
  modified_base 6: mod_base = OTHER; note = Nucleotide with phosphorothioate linkage
  modified_base 7: mod_base = OTHER; note = Thymine with phosphorothioate linkage
  modified_base 8: mod_base = OTHER; note = Nucleotide with phosphorothioate linkage
  modified_base 9: mod_base = OTHER; note = Nucleotide with phosphorothioate linkage
  modified_base 10: mod_base = OTHER; note = Nucleotide with phosphorothioate linkage
  modified_base 11: mod_base = OTHER; note = Nucleotide with phosphorothioate linkage
  modified_base 12: mod_base = OTHER; note = 5-methylcytosine with phosphorothioate linkage
  modified_base 13: mod_base = OTHER; note = Nucleotide with phosphorothioate linkage
  modified_base 14: mod_base = OTHER; note = Nucleotide with phosphorothioate linkage
  modified_base 15: mod_base = OTHER; note = Nucleotide with phosphorothioate linkage
  modified_base 16: mod_base = OTHER; note = 2'-O-methyl modified nucleotide with phosphorothioate linkage
  modified_base 17: mod_base = OTHER; note = 2'-O-methoxyethyl modified thymine with phosphorothioate linkage
  modified_base 18: mod_base = OTHER; note = 2'-O-methyl modified nucleotide with phosphorothioate linkage
  modified_base 19: mod_base = OTHER; note = 2'-O-methoxyethyl 5-methylcytosine with phosphorothioate linkage
  modified_base 20: mod_base = OTHER; note = 2'-O-methyl modified nucleotide
  misc_feature 1..5: note = RNA
  misc_feature 6..15: note = DNA
  misc_feature 16..20: note = RNA
cagaggtgaagcgaagtgca

SEQ ID NO: 280 - DNA, 20 bp, synthetic construct
  source 1..20: mol_type = other DNA
  modified_base 1: mod_base = OTHER; note = 2'-O-methoxyethyl 5-methylcytosine with phosphorothioate linkage
  modified_base 2: mod_base = OTHER; note = 2'-O-methoxyethyl modified nucleotide with phosphorothioate linkage
  modified_base 3: mod_base = OTHER; note = Locked nucleic acid with phosphorothioate linkage
  modified_base 4: mod_base = OTHER; note = 2'-O-methoxyethyl modified nucleotide with phosphorothioate linkage
  modified_base 5: mod_base = OTHER; note = Locked nucleic acid with phosphorothioate linkage
  modified_base 6: mod_base = OTHER; note = Nucleotide with phosphorothioate linkage
  modified_base 7: mod_base = OTHER; note = Thymine with phosphorothioate linkage
  modified_base 8: mod_base = OTHER; note = Nucleotide with phosphorothioate linkage
  modified_base 9: mod_base = OTHER; note = Nucleotide with phosphorothioate linkage
  modified_base 10: mod_base = OTHER; note = Nucleotide with phosphorothioate linkage
  modified_base 11: mod_base = OTHER; note = Nucleotide with phosphorothioate linkage
  modified_base 12: mod_base = OTHER; note = 5-methylcytosine with phosphorothioate linkage
  modified_base 13: mod_base = OTHER; note = Nucleotide with phosphorothioate linkage
  modified_base 14: mod_base = OTHER; note = Nucleotide with phosphorothioate linkage
  modified_base 15: mod_base = OTHER; note = Nucleotide with phosphorothioate linkage
  modified_base 16: mod_base = OTHER; note = 2'-O-methyl modified nucleotide with phosphorothioate linkage
  modified_base 17: mod_base = OTHER; note = 2'-O-methoxyethyl modified thymine with phosphorothioate linkage
  modified_base 18: mod_base = OTHER; note = 2'-O-methyl modified nucleotide with phosphorothioate linkage
  modified_base 19: mod_base = OTHER; note = 2'-O-methoxyethyl 5-methylcytosine with phosphorothioate linkage
  modified_base 20: mod_base = OTHER; note = 2'-O-methyl modified nucleotide
  misc_feature 1..5: note = RNA
  misc_feature 6..15: note = DNA
  misc_feature 16..20: note = RNA
cagaggtgaagcgaagtgca

SEQ ID NO: 281 - DNA, 20 bp, synthetic construct
  source 1..20: mol_type = other DNA
  modified_base 1: mod_base = OTHER; note = 2'-O-methoxyethyl 5-methylcytosine with phosphorothioate linkage
  modified_base 2: mod_base = OTHER; note = 2'-O-methoxyethyl modified nucleotide with phosphorothioate linkage
  modified_base 3: mod_base = OTHER; note = 2'-O-methoxyethyl modified nucleotide with phosphorothioate linkage
  modified_base 4: mod_base = OTHER; note = 2'-O-methoxyethyl modified nucleotide with phosphorothioate linkage
  modified_base 5: mod_base = OTHER; note = 2'-O-methoxyethyl modified nucleotide with phosphorothioate linkage
  modified_base 6: mod_base = OTHER; note = Nucleotide with phosphorothioate linkage
  modified_base 7: mod_base = OTHER; note = Thymine with phosphorothioate linkage
  modified_base 8: mod_base = OTHER; note = Nucleotide with phosphorothioate linkage
  modified_base 9: mod_base = OTHER; note = Nucleotide with phosphorothioate linkage
  modified_base 10: mod_base = OTHER; note = Nucleotide with phosphorothioate linkage
  modified_base 11: mod_base = OTHER; note = Nucleotide with phosphorothioate linkage
  modified_base 12: mod_base = OTHER; note = 5-methylcytosine with phosphorothioate linkage
  modified_base 13: mod_base = OTHER; note = Nucleotide with phosphorothioate linkage
  modified_base 14: mod_base = OTHER; note = Nucleotide with phosphorothioate linkage
  modified_base 15: mod_base = OTHER; note = Nucleotide with phosphorothioate linkage
  modified_base 16: mod_base = OTHER; note = 2'-O-methyl modified nucleotide with phosphorothioate linkage
  modified_base 17: mod_base = OTHER; note = 2'-O-methoxyethyl modified thymine with phosphorothioate linkage
  modified_base 18: mod_base = OTHER; note = Locked nucleic acid with phosphorothioate linkage
  modified_base 19: mod_base = OTHER; note = 2'-O-methoxyethyl 5-methylcytosine with phosphorothioate linkage
  modified_base 20: mod_base = OTHER; note = 2'-O-methyl modified nucleotide
  misc_feature 1..5: note = RNA
  misc_feature 6..15: note = DNA
  misc_feature 16..20: note = RNA
cagaggtgaagcgaagtgca

SEQ ID NO: 282 - DNA, 20 bp, synthetic construct
  source 1..20: mol_type = other DNA
  modified_base 1: mod_base = OTHER; note = 2'-O-methoxyethyl 5-methylcytosine with phosphorothioate linkage
  modified_base 2: mod_base = OTHER; note = 2'-O-methoxyethyl modified nucleotide with phosphorothioate linkage
  modified_base 3: mod_base = OTHER; note = Locked nucleic acid with phosphorothioate linkage
  modified_base 4: mod_base = OTHER; note = 2'-O-methoxyethyl modified nucleotide with phosphorothioate linkage
  modified_base 5: mod_base = OTHER; note = 2'-O-methoxyethyl modified nucleotide with phosphorothioate linkage
  modified_base 6: mod_base = OTHER; note = Nucleotide with phosphorothioate linkage
  modified_base 7: mod_base = OTHER; note = Thymine with phosphorothioate linkage
  modified_base 8: mod_base = OTHER; note = Nucleotide with phosphorothioate linkage
  modified_base 9: mod_base = OTHER; note = Nucleotide with phosphorothioate linkage
  modified_base 10: mod_base = OTHER; note = Nucleotide with phosphorothioate linkage
  modified_base 11: mod_base = OTHER; note = Nucleotide with phosphorothioate linkage
  modified_base 12: mod_base = OTHER; note = 5-methylcytosine with phosphorothioate linkage
  modified_base 13: mod_base = OTHER; note = Nucleotide with phosphorothioate linkage
  modified_base 14: mod_base = OTHER; note = Nucleotide with phosphorothioate linkage
  modified_base 15: mod_base = OTHER; note = Nucleotide with phosphorothioate linkage
  modified_base 16: mod_base = OTHER; note = 2'-O-methyl modified nucleotide with phosphorothioate linkage
  modified_base 17: mod_base = OTHER; note = 2'-O-methoxyethyl modified thymine with phosphorothioate linkage
  modified_base 18: mod_base = OTHER; note = Locked nucleic acid with phosphorothioate linkage
  modified_base 19: mod_base = OTHER; note = 2'-O-methoxyethyl 5-methylcytosine with phosphorothioate linkage
  modified_base 20: mod_base = OTHER; note = 2'-O-methyl modified nucleotide
  misc_feature 1..5: note = RNA
  misc_feature 6..15: note = DNA
  misc_feature 16..20: note = RNA
cagaggtgaagcgaagtgca

SEQ ID NO: 283 - DNA, 20 bp, synthetic construct
  source 1..20: mol_type = other DNA
  modified_base 1: mod_base = OTHER; note = 2'-O-methoxyethyl 5-methylcytosine with phosphorothioate linkage
  modified_base 2: mod_base = OTHER; note = 2'-O-methoxyethyl modified nucleotide with phosphorothioate linkage
  modified_base 3: mod_base = OTHER; note = 2'-O-methoxyethyl modified nucleotide with phosphorothioate linkage
  modified_base 4: mod_base = OTHER; note = 2'-O-methoxyethyl modified nucleotide with phosphorothioate linkage
  modified_base 5: mod_base = OTHER; note = Locked nucleic acid with phosphorothioate linkage
  modified_base 6: mod_base = OTHER; note = Nucleotide with phosphorothioate linkage
  modified_base 7: mod_base = OTHER; note = Thymine with phosphorothioate linkage
  modified_base 8: mod_base = OTHER; note = Nucleotide with phosphorothioate linkage
  modified_base 9: mod_base = OTHER; note = Nucleotide with phosphorothioate linkage
  modified_base 10: mod_base = OTHER; note = Nucleotide with phosphorothioate linkage
  modified_base 11: mod_base = OTHER; note = Nucleotide with phosphorothioate linkage
  modified_base 12: mod_base = OTHER; note = 5-methylcytosine with phosphorothioate linkage
  modified_base 13: mod_base = OTHER; note = Nucleotide with phosphorothioate linkage
  modified_base 14: mod_base = OTHER; note = Nucleotide with phosphorothioate linkage
  modified_base 15: mod_base = OTHER; note = Nucleotide with phosphorothioate linkage
  modified_base 16: mod_base = OTHER; note = 2'-O-methyl modified nucleotide with phosphorothioate linkage
  modified_base 17: mod_base = OTHER; note = 2'-O-methoxyethyl modified thymine with phosphorothioate linkage
  modified_base 18: mod_base = OTHER; note = Locked nucleic acid with phosphorothioate linkage
  modified_base 19: mod_base = OTHER; note = 2'-O-methoxyethyl 5-methylcytosine with phosphorothioate linkage
  modified_base 20: mod_base = OTHER; note = 2'-O-methyl modified nucleotide
  misc_feature 1..5: note = RNA
  misc_feature 6..15: note = DNA
  misc_feature 16..20: note = RNA
cagaggtgaagcgaagtgca

SEQ ID NO: 284 - DNA, 20 bp, synthetic construct
  source 1..20: mol_type = other DNA
  modified_base 1: mod_base = OTHER; note = 2'-O-methoxyethyl 5-methylcytosine with phosphorothioate linkage
  modified_base 2: mod_base = OTHER; note = 2'-O-methoxyethyl modified nucleotide with phosphorothioate linkage
  modified_base 3: mod_base = OTHER; note = Locked nucleic acid with phosphorothioate linkage
  modified_base 4: mod_base = OTHER; note = 2'-O-methoxyethyl modified nucleotide with phosphorothioate linkage
  modified_base 5: mod_base = OTHER; note = Locked nucleic acid with phosphorothioate linkage
  modified_base 6: mod_base = OTHER; note = Nucleotide with phosphorothioate linkage
  modified_base 7: mod_base = OTHER; note = Thymine with phosphorothioate linkage
  modified_base 8: mod_base = OTHER; note = Nucleotide with phosphorothioate linkage
  modified_base 9: mod_base = OTHER; note = Nucleotide with phosphorothioate linkage
  modified_base 10: mod_base = OTHER; note = Nucleotide with phosphorothioate linkage
  modified_base 11: mod_base = OTHER; note = Nucleotide with phosphorothioate linkage
  modified_base 12: mod_base = OTHER; note = 5-methylcytosine with phosphorothioate linkage
  modified_base 13: mod_base = OTHER; note = Nucleotide with phosphorothioate linkage
  modified_base 14: mod_base = OTHER; note = Nucleotide with phosphorothioate linkage
  modified_base 15: mod_base = OTHER; note = Nucleotide with phosphorothioate linkage
  modified_base 16: mod_base = OTHER; note = 2'-O-methyl modified nucleotide with phosphorothioate linkage
  modified_base 17: mod_base = OTHER; note = 2'-O-methoxyethyl modified thymine with phosphorothioate linkage
  modified_base 18: mod_base = OTHER; note = Locked nucleic acid with phosphorothioate linkage
  modified_base 19: mod_base = OTHER; note = 2'-O-methoxyethyl 5-methylcytosine with phosphorothioate linkage
  modified_base 20: mod_base = OTHER; note = 2'-O-methyl modified nucleotide
  misc_feature 1..5: note = RNA
  misc_feature 6..15: note = DNA
  misc_feature 16..20: note = RNA
cagaggtgaagcgaagtgca

SEQ ID NO: 285 - DNA, 20 bp, synthetic construct
  source 1..20: mol_type = other DNA
  modified_base 1: mod_base = OTHER; note = 2'-O-methoxyethyl modified nucleotide with phosphorothioate linkage
  modified_base 2: mod_base = OTHER; note = 2'-O-methoxyethyl 5-methylcytosine with phosphorothioate linkage
  modified_base 3: mod_base = OTHER; note = 2'-O-methyl modified nucleotide with phosphorothioate linkage
  modified_base 4: mod_base = OTHER; note = 2'-O-methoxyethyl modified thymine with phosphorothioate linkage
  modified_base 5: mod_base = OTHER; note = 2'-O-methyl modified nucleotide with phosphorothioate linkage
  modified_base 6: mod_base = OTHER; note = 5-methylcytosine with phosphorothioate linkage
  modified_base 7: mod_base = OTHER; note = Nucleotide with phosphorothioate linkage
  modified_base 8: mod_base = OTHER; note = Nucleotide with phosphorothioate linkage
  modified_base 9: mod_base = OTHER; note = Nucleotide with phosphorothioate linkage
  modified_base 10: mod_base = OTHER; note = Nucleotide with phosphorothioate linkage
  modified_base 11: mod_base = OTHER; note = Nucleotide with phosphorothioate linkage
  modified_base 12: mod_base = OTHER; note = Thymine with phosphorothioate linkage
  modified_base 13: mod_base = OTHER; note = Nucleotide with phosphorothioate linkage
  modified_base 14: mod_base = OTHER; note = Nucleotide with phosphorothioate linkage
  modified_base 15: mod_base = OTHER; note = Nucleotide with phosphorothioate linkage
  modified_base 16: mod_base = OTHER; note = 2'-O-methoxyethyl modified nucleotide with phosphorothioate linkage
  modified_base 17: mod_base = OTHER; note = 2'-O-methoxyethyl 5-methylcytosine with phosphorothioate linkage
  modified_base 18: mod_base = OTHER; note = 2'-O-methoxyethyl modified nucleotide with phosphorothioate linkage
  modified_base 19: mod_base = OTHER; note = 2'-O-methoxyethyl modified nucleotide with phosphorothioate linkage
  modified_base 20: mod_base = OTHER; note = 2'-O-methoxyethyl modified nucleotide
  misc_feature 1..5: note = RNA
  misc_feature 6..15: note = DNA
  misc_feature 16..20: note = RNA
acgtgcagaggtgaagcgaa

SEQ ID NO: 286 - DNA, 20 bp, synthetic construct
  source 1..20: mol_type = other DNA
  modified_base 1: mod_base = OTHER; note = 2'-O-methoxyethyl modified nucleotide with phosphorothioate linkage
  modified_base 2: mod_base = OTHER; note = 2'-O-methoxyethyl 5-methylcytosine with phosphorothioate linkage
  modified_base 3: mod_base = OTHER; note = 2'-O-methoxyethyl modified nucleotide with phosphorothioate linkage
  modified_base 4: mod_base = OTHER; note = 2'-O-methoxyethyl modified thymine with phosphorothioate linkage
  modified_base 5: mod_base = OTHER; note = 2'-O-methoxyethyl modified nucleotide with phosphorothioate linkage
  modified_base 6: mod_base = OTHER; note = 5-methylcytosine with phosphorothioate linkage
  modified_base 7: mod_base = OTHER; note = Nucleotide with phosphorothioate linkage
  modified_base 8: mod_base = OTHER; note = Nucleotide with phosphorothioate linkage
  modified_base 9: mod_base = OTHER; note = Nucleotide with phosphorothioate linkage
  modified_base 10: mod_base = OTHER; note = Nucleotide with phosphorothioate linkage
  modified_base 11: mod_base = OTHER; note = Nucleotide with phosphorothioate linkage
  modified_base 12: mod_base = OTHER; note = Thymine with phosphorothioate linkage
  modified_base 13: mod_base = OTHER; note = Nucleotide with phosphorothioate linkage
  modified_base 14: mod_base = OTHER; note = Nucleotide with phosphorothioate linkage
  modified_base 15: mod_base = OTHER; note = Nucleotide with phosphorothioate linkage
  modified_base 16: mod_base = OTHER; note = 2'-O-methyl modified nucleotide with phosphorothioate linkage
  modified_base 17: mod_base = OTHER; note = 2'-O-methoxyethyl 5-methylcytosine with phosphorothioate linkage
  modified_base 18: mod_base = OTHER; note = 2'-O-methyl modified nucleotide with phosphorothioate linkage
  modified_base 19: mod_base = OTHER; note = 2'-O-methoxyethyl modified nucleotide with phosphorothioate linkage
  modified_base 20: mod_base = OTHER; note = 2'-O-methoxyethyl modified nucleotide
  misc_feature 1..5: note = RNA
  misc_feature 6..15: note = DNA
  misc_feature 16..20: note = RNA
acgtgcagaggtgaagcgaa

SEQ ID NO: 287 - DNA, 20 bp, synthetic construct
  source 1..20: mol_type = other DNA
  modified_base 1: mod_base = OTHER; note = 2'-O-methoxyethyl modified nucleotide with phosphorothioate linkage
  modified_base 2: mod_base = OTHER; note = 2'-O-methoxyethyl 5-methylcytosine with phosphorothioate linkage
  modified_base 3: mod_base = OTHER; note = 2'-O-methyl modified nucleotide with phosphorothioate linkage
  modified_base 4: mod_base = OTHER; note = 2'-O-methoxyethyl modified thymine with phosphorothioate linkage
  modified_base 5: mod_base = OTHER; note = 2'-O-methyl modified nucleotide with phosphorothioate linkage
  modified_base 6: mod_base = OTHER; note = 5-methylcytosine with phosphorothioate linkage
  modified_base 7: mod_base = OTHER; note = Nucleotide with phosphorothioate linkage
  modified_base 8: mod_base = OTHER; note = Nucleotide with phosphorothioate linkage
  modified_base 9: mod_base = OTHER; note = Nucleotide with phosphorothioate linkage
  modified_base 10: mod_base = OTHER; note = Nucleotide with phosphorothioate linkage
  modified_base 11: mod_base = OTHER; note = Nucleotide with phosphorothioate linkage
  modified_base 12: mod_base = OTHER; note = Thymine with phosphorothioate linkage
  modified_base 13: mod_base = OTHER; note = Nucleotide with phosphorothioate linkage
  modified_base 14: mod_base = OTHER; note = Nucleotide with phosphorothioate linkage
  modified_base 15: mod_base = OTHER; note = Nucleotide with phosphorothioate linkage
  modified_base 16: mod_base = OTHER; note = 2'-O-methyl modified nucleotide with phosphorothioate linkage
  modified_base 17: mod_base = OTHER; note = 2'-O-methoxyethyl 5-methylcytosine with phosphorothioate linkage
  modified_base 18: mod_base = OTHER; note = 2'-O-methoxyethyl modified nucleotide with phosphorothioate linkage
  modified_base 19: mod_base = OTHER; note = 2'-O-methoxyethyl modified nucleotide with phosphorothioate linkage
  modified_base 20: mod_base = OTHER; note = 2'-O-methoxyethyl modified nucleotide
  misc_feature 1..5: note = RNA
  misc_feature 6..15: note = DNA
  misc_feature 16..20: note = RNA
acgtgcagaggtgaagcgaa

SEQ ID NO: 288 - DNA, 20 bp, synthetic construct
  source 1..20: mol_type = other DNA
  modified_base 1: mod_base = OTHER; note = 2'-O-methoxyethyl modified nucleotide with phosphorothioate linkage
  modified_base 2: mod_base = OTHER; note = 2'-O-methoxyethyl 5-methylcytosine with phosphorothioate linkage
  modified_base 3: mod_base = OTHER; note = 2'-O-methyl modified nucleotide with phosphorothioate linkage
  modified_base 4: mod_base = OTHER; note = 2'-O-methoxyethyl modified thymine with phosphorothioate linkage
  modified_base 5: mod_base = OTHER; note = 2'-O-methyl modified nucleotide with phosphorothioate linkage
  modified_base 6: mod_base = OTHER; note = 5-methylcytosine with phosphorothioate linkage
  modified_base 7: mod_base = OTHER; note = Nucleotide with phosphorothioate linkage
  modified_base 8: mod_base = OTHER; note = Nucleotide with phosphorothioate linkage
  modified_base 9: mod_base = OTHER; note = Nucleotide with phosphorothioate linkage
  modified_base 10: mod_base = OTHER; note = Nucleotide with phosphorothioate linkage
  modified_base 11: mod_base = OTHER; note = Nucleotide with phosphorothioate linkage
  modified_base 12: mod_base = OTHER; note = Thymine with phosphorothioate linkage
  modified_base 13: mod_base = OTHER; note = Nucleotide with phosphorothioate linkage
  modified_base 14: mod_base = OTHER; note = Nucleotide with phosphorothioate linkage
  modified_base 15: mod_base = OTHER; note = Nucleotide with phosphorothioate linkage
  modified_base 16: mod_base = OTHER; note = 2'-O-methoxyethyl modified nucleotide with phosphorothioate linkage
  modified_base 17: mod_base = OTHER; note = 2'-O-methoxyethyl 5-methylcytosine with phosphorothioate linkage
  modified_base 18: mod_base = OTHER; note = 2'-O-methyl modified nucleotide with phosphorothioate linkage
  modified_base 19: mod_base = OTHER; note = 2'-O-methoxyethyl modified nucleotide with phosphorothioate linkage
  modified_base 20: mod_base = OTHER; note = 2'-O-methoxyethyl modified nucleotide
  misc_feature 1..5: note = RNA
  misc_feature 6..15: note = DNA
  misc_feature 16..20: note = RNA
acgtgcagaggtgaagcgaa

SEQ ID NO: 289 - DNA, 20 bp, synthetic construct
  source 1..20: mol_type = other DNA
  modified_base 1: mod_base = OTHER; note = 2'-O-methoxyethyl modified nucleotide with phosphorothioate linkage
  modified_base 2: mod_base = OTHER; note = 2'-O-methoxyethyl 5-methylcytosine with phosphorothioate linkage
  modified_base 3: mod_base = OTHER; note = 2'-O-methyl modified nucleotide with phosphorothioate linkage
  modified_base 4: mod_base = OTHER; note = 2'-O-methoxyethyl modified thymine with phosphorothioate linkage
  modified_base 5: mod_base = OTHER; note = 2'-O-methoxyethyl modified nucleotide with phosphorothioate linkage
  modified_base 6: mod_base = OTHER; note = 5-methylcytosine with phosphorothioate linkage
  modified_base 7: mod_base = OTHER; note = Nucleotide with phosphorothioate linkage
  modified_base 8: mod_base = OTHER; note = Nucleotide with phosphorothioate linkage
  modified_base 9: mod_base = OTHER; note = Nucleotide with phosphorothioate linkage
  modified_base 10: mod_base = OTHER; note = Nucleotide with phosphorothioate linkage
  modified_base 11: mod_base = OTHER; note = Nucleotide with phosphorothioate linkage
  modified_base 12: mod_base = OTHER; note = Thymine with phosphorothioate linkage
  modified_base 13: mod_base = OTHER; note = Nucleotide with phosphorothioate linkage
  modified_base 14: mod_base = OTHER; note = Nucleotide with phosphorothioate linkage
  modified_base 15: mod_base = OTHER; note = Nucleotide with phosphorothioate linkage
  modified_base 16: mod_base = OTHER; note = 2'-O-methyl modified nucleotide with phosphorothioate linkage
  modified_base 17: mod_base = OTHER; note = 2'-O-methoxyethyl 5-methylcytosine with phosphorothioate linkage
  modified_base 18: mod_base = OTHER; note = 2'-O-methyl modified nucleotide with phosphorothioate linkage
  modified_base 19: mod_base = OTHER; note = 2'-O-methoxyethyl modified nucleotide with phosphorothioate linkage
  modified_base 20: mod_base = OTHER; note = 2'-O-methoxyethyl modified nucleotide
  misc_feature 1..5: note = RNA
  misc_feature 6..15: note = DNA
  misc_feature 16..20: note = RNA
acgtgcagaggtgaagcgaa

SEQ ID NO: 290 - DNA, 20 bp, synthetic construct
  source 1..20: mol_type = other DNA
  modified_base 1: mod_base = OTHER; note = 2'-O-methoxyethyl modified nucleotide with phosphorothioate linkage
  modified_base 2: mod_base = OTHER; note = 2'-O-methoxyethyl 5-methylcytosine with phosphorothioate linkage
  modified_base 3: mod_base = OTHER; note = 2'-O-methoxyethyl modified nucleotide with phosphorothioate linkage
  modified_base 4: mod_base = OTHER; note = 2'-O-methoxyethyl modified thymine with phosphorothioate linkage
  modified_base 5: mod_base = OTHER; note = 2'-O-methyl modified nucleotide with phosphorothioate linkage
  modified_base 6: mod_base = OTHER; note = 5-methylcytosine with phosphorothioate linkage
  modified_base 7: mod_base = OTHER; note = Nucleotide with phosphorothioate linkage
  modified_base 8: mod_base = OTHER; note = Nucleotide with phosphorothioate linkage
  modified_base 9: mod_base = OTHER; note = Nucleotide with phosphorothioate linkage
  modified_base 10: mod_base = OTHER; note = Nucleotide with phosphorothioate linkage
  modified_base 11: mod_base = OTHER; note = Nucleotide with phosphorothioate linkage
  modified_base 12: mod_base = OTHER; note = Thymine with phosphorothioate linkage
  modified_base 13: mod_base = OTHER; note = Nucleotide with phosphorothioate linkage
  modified_base 14: mod_base = OTHER; note = Nucleotide with phosphorothioate linkage
  modified_base 15: mod_base = OTHER; note = Nucleotide with phosphorothioate linkage
  modified_base 16: mod_base = OTHER; note = 2'-O-methyl modified nucleotide with phosphorothioate linkage
  modified_base 17: mod_base = OTHER; note = 2'-O-methoxyethyl 5-methylcytosine with phosphorothioate linkage
  modified_base 18: mod_base = OTHER; note = 2'-O-methyl modified nucleotide with phosphorothioate linkage
  modified_base 19: mod_base = OTHER; note = 2'-O-methoxyethyl modified nucleotide with phosphorothioate linkage
  modified_base 20: mod_base = OTHER; note = 2'-O-methoxyethyl modified nucleotide
  misc_feature 1..5: note = RNA
  misc_feature 6..15: note = DNA
  misc_feature 16..20: note = RNA
acgtgcagaggtgaagcgaa

SEQ ID NO: 291 - DNA, 20 bp, synthetic construct
  source 1..20: mol_type = other DNA
  modified_base 1: mod_base = OTHER; note = 2'-O-methoxyethyl modified nucleotide with phosphorothioate linkage
  modified_base 2: mod_base = OTHER; note = 2'-O-methoxyethyl 5-methylcytosine with phosphorothioate linkage
  modified_base 3: mod_base = OTHER; note = 2'-O-methyl modified nucleotide with phosphorothioate linkage
  modified_base 4: mod_base = OTHER; note = 2'-O-methoxyethyl modified thymine with phosphorothioate linkage
  modified_base 5: mod_base = OTHER; note = 2'-O-methyl modified nucleotide with phosphorothioate linkage
  modified_base 6: mod_base = OTHER; note = 5-methylcytosine with phosphorothioate linkage
  modified_base 7: mod_base = OTHER; note = Nucleotide with phosphorothioate linkage
  modified_base 8: mod_base = OTHER; note = Nucleotide with phosphorothioate linkage
  modified_base 9: mod_base = OTHER; note = Nucleotide with phosphorothioate linkage
  modified_base 10: mod_base = OTHER; note = Nucleotide with phosphorothioate linkage
  modified_base 11: mod_base = OTHER; note = Nucleotide with phosphorothioate linkage
  modified_base 12: mod_base = OTHER; note = Thymine with phosphorothioate linkage
  modified_base 13: mod_base = OTHER; note = Nucleotide with phosphorothioate linkage
  modified_base 14: mod_base = OTHER; note = Nucleotide with phosphorothioate linkage
  modified_base 15: mod_base = OTHER; note = Nucleotide with phosphorothioate linkage
  modified_base 16: mod_base = OTHER; note = 2'-O-methyl modified nucleotide with phosphorothioate linkage
  modified_base 17: mod_base = OTHER; note = 2'-O-methoxyethyl 5-methylcytosine with phosphorothioate linkage
  modified_base 18: mod_base = OTHER; note = 2'-O-methyl modified nucleotide with phosphorothioate linkage
  modified_base 19: mod_base = OTHER; note = 2'-O-methoxyethyl modified nucleotide with phosphorothioate linkage
  modified_base 20: mod_base = OTHER; note = 2'-O-methoxyethyl modified nucleotide
  misc_feature 1..5: note = RNA
  misc_feature 6..15: note = DNA
  misc_feature 16..20: note = RNA
acgtgcagaggtgaagcgaa

SEQ ID NO: 292 - DNA, 20 bp, synthetic construct
  source 1..20: mol_type = other DNA
  modified_base 1: mod_base = OTHER; note = 2'-O-methoxyethyl modified nucleotide with phosphorothioate linkage
  modified_base 2: mod_base = OTHER; note = 2'-O-methoxyethyl 5-methylcytosine with phosphorothioate linkage
  modified_base 3: mod_base = OTHER; note = 2'-O-methoxyethyl modified nucleotide with phosphorothioate linkage
  modified_base 4: mod_base = OTHER; note = 2'-O-methoxyethyl modified thymine with phosphorothioate linkage
  modified_base 5: mod_base = OTHER; note = 2'-O-methoxyethyl modified nucleotide with phosphorothioate linkage
  modified_base 6: mod_base = OTHER; note = 5-methylcytosine with phosphorothioate linkage
  modified_base 7: mod_base = OTHER; note = Nucleotide with phosphorothioate linkage
  modified_base 8: mod_base = OTHER; note = Nucleotide with phosphorothioate linkage
  modified_base 9: mod_base = OTHER; note = Nucleotide with phosphorothioate linkage
  modified_base 10: mod_base = OTHER; note = Nucleotide with phosphorothioate linkage
  modified_base 11: mod_base = OTHER; note = Nucleotide with phosphorothioate linkage
  modified_base 12: mod_base = OTHER; note = Thymine with phosphorothioate linkage
  modified_base 13: mod_base = OTHER; note = Nucleotide with phosphorothioate linkage
  modified_base 14: mod_base = OTHER; note = Nucleotide with phosphorothioate linkage
  modified_base 15: mod_base = OTHER; note = 2'-O-methyl modified nucleotide with phosphorothioate linkage
  modified_base 16: mod_base = OTHER; note = 2'-O-methyl modified nucleotide with phosphorothioate linkage
  modified_base 17: mod_base = OTHER; note = 2'-O-methoxyethyl 5-methylcytosine with phosphorothioate linkage
  modified_base 18: mod_base = OTHER; note = 2'-O-methoxyethyl modified nucleotide with phosphorothioate linkage
  modified_base 19: mod_base = OTHER; note = 2'-O-methoxyethyl modified nucleotide with phosphorothioate linkage
  modified_base 20: mod_base = OTHER; note = 2'-O-methoxyethyl modified nucleotide
  misc_feature 1..5: note = RNA
  misc_feature 6..14: note = DNA
  misc_feature 15..20: note = RNA
acgtgcagaggtgaagcgaa

SEQ ID NO: 293 - DNA, 20 bp, synthetic construct
  source 1..20: mol_type = other DNA
  modified_base 1: mod_base = OTHER; note = 2'-O-methoxyethyl modified nucleotide with phosphorothioate linkage
  modified_base 2: mod_base = OTHER; note = 2'-O-methoxyethyl 5-methylcytosine with phosphorothioate linkage
  modified_base 3: mod_base = OTHER; note = 2'-O-methoxyethyl modified nucleotide with phosphorothioate linkage
  modified_base 4: mod_base = OTHER; note = 2'-O-methoxyethyl modified thymine with phosphorothioate linkage
  modified_base 5: mod_base = OTHER; note = 2'-O-methoxyethyl modified nucleotide with phosphorothioate linkage
  modified_base 6: mod_base = OTHER; note = 5-methylcytosine with phosphorothioate linkage
  modified_base 7: mod_base = OTHER; note = Nucleotide with phosphorothioate linkage
  modified_base 8: mod_base = OTHER; note = Nucleotide with phosphorothioate linkage
  modified_base 9: mod_base = OTHER; note = Nucleotide with phosphorothioate linkage
  modified_base 10: mod_base = OTHER; note = Nucleotide with phosphorothioate linkage
  modified_base 11: mod_base = OTHER; note = Nucleotide with phosphorothioate linkage
  modified_base 12: mod_base = OTHER; note = Thymine with phosphorothioate linkage
  modified_base 13: mod_base = OTHER; note = Nucleotide with phosphorothioate linkage
  modified_base 14: mod_base = OTHER; note = Nucleotide with phosphorothioate linkage
  modified_base 15: mod_base = OTHER; note = Nucleotide with phosphorothioate linkage
  modified_base 16: mod_base = OTHER; note = 2'-O-methyl modified nucleotide with phosphorothioate linkage
  modified_base 17: mod_base = OTHER; note = 2'-O-methoxyethyl 5-methylcytosine with phosphorothioate linkage
  modified_base 18: mod_base = OTHER; note = 2'-O-methyl modified nucleotide with phosphorothioate linkage
  modified_base 19: mod_base = OTHER; note = 2'-O-methyl modified nucleotide with phosphorothioate linkage
  modified_base 20: mod_base = OTHER; note = 2'-O-methoxyethyl modified nucleotide
  misc_feature 1..5: note = RNA
  misc_feature 6..15: note = DNA
  misc_feature 16..20: note = RNA
acgtgcagaggtgaagcgaa

SEQ ID NO: 294 - DNA, 20 bp, synthetic construct
  source 1..20: mol_type = other DNA
  modified_base 1: mod_base = OTHER; note = 2'-O-methoxyethyl modified nucleotide with phosphorothioate linkage
  modified_base 2: mod_base = OTHER; note = 2'-O-methoxyethyl 5-methylcytosine with phosphorothioate linkage
  modified_base 3: mod_base = OTHER; note = 2'-O-methoxyethyl modified nucleotide with phosphorothioate linkage
  modified_base 4: mod_base = OTHER; note = 2'-O-methoxyethyl modified thymine with phosphorothioate linkage
  modified_base 5: mod_base = OTHER; note = 2'-O-methoxyethyl modified nucleotide with phosphorothioate linkage
  modified_base 6: mod_base = OTHER; note = 5-methylcytosine with phosphorothioate linkage
  modified_base 7: mod_base = OTHER; note = Nucleotide with phosphorothioate linkage
  modified_base 8: mod_base = OTHER; note = Nucleotide with phosphorothioate linkage
  modified_base 9: mod_base = OTHER; note = Nucleotide with phosphorothioate linkage
  modified_base 10: mod_base = OTHER; note = Nucleotide with phosphorothioate linkage
  modified_base 11: mod_base = OTHER; note = Nucleotide with phosphorothioate linkage
  modified_base 12: mod_base = OTHER; note = Thymine with phosphorothioate linkage
  modified_base 13: mod_base = OTHER; note = Nucleotide with phosphorothioate linkage
  modified_base 14: mod_base = OTHER; note = Nucleotide with phosphorothioate linkage
  modified_base 15: mod_base = OTHER; note = Nucleotide with phosphorothioate linkage
  modified_base 16: mod_base = OTHER; note = 2'-O-methyl modified nucleotide with phosphorothioate linkage
  modified_base 17: mod_base = OTHER; note = 2'-O-methoxyethyl 5-methylcytosine with phosphorothioate linkage
  modified_base 18: mod_base = OTHER; note = 2'-O-methyl modified nucleotide with phosphorothioate linkage
  modified_base 19: mod_base = OTHER; note = 2'-O-methoxyethyl modified nucleotide with phosphorothioate linkage
  modified_base 20: mod_base = OTHER; note = 2'-O-methyl modified nucleotide
  misc_feature 1..5: note = RNA
  misc_feature 6..15: note = DNA
  misc_feature 16..20: note = RNA
acgtgcagaggtgaagcgaa

SEQ ID NO: 295 - DNA, 20 bp, synthetic construct
  source 1..20: mol_type = other DNA
  modified_base 1: mod_base = OTHER; note = 2'-O-methoxyethyl modified nucleotide with phosphorothioate linkage
  modified_base 2: mod_base = OTHER; note = 2'-O-methoxyethyl 5-methylcytosine with phosphorothioate linkage
  modified_base 3: mod_base = OTHER; note = 2'-O-methoxyethyl modified nucleotide with phosphorothioate linkage
  modified_base 4: mod_base = OTHER; note = 2'-O-methoxyethyl modified thymine with phosphorothioate linkage
  modified_base 5: mod_base = OTHER; note = 2'-O-methoxyethyl modified nucleotide with phosphorothioate linkage
  modified_base 6: mod_base = OTHER; note = 5-methylcytosine with phosphorothioate linkage
  modified_base 7: mod_base = OTHER; note = Nucleotide with phosphorothioate linkage
  modified_base 8: mod_base = OTHER; note = Nucleotide with phosphorothioate linkage
  modified_base 9: mod_base = OTHER; note = Nucleotide with phosphorothioate linkage
  modified_base 10: mod_base = OTHER; note = Nucleotide with phosphorothioate linkage
  modified_base 11: mod_base = OTHER; note = Nucleotide with phosphorothioate linkage
  modified_base 12: mod_base = OTHER; note = Thymine with phosphorothioate linkage
  modified_base 13: mod_base = OTHER; note = Nucleotide with phosphorothioate linkage
  modified_base 14: mod_base = OTHER; note = Nucleotide with phosphorothioate linkage
  modified_base 15: mod_base = OTHER; note = Nucleotide with phosphorothioate linkage
  modified_base 16: mod_base = OTHER; note = 2'-O-methyl modified nucleotide with phosphorothioate linkage
  modified_base 17: mod_base = OTHER; note = 2'-O-methoxyethyl 5-methylcytosine with phosphorothioate linkage
  modified_base 18: mod_base = OTHER; note = 2'-O-methoxyethyl modified nucleotide with phosphorothioate linkage
  modified_base 19: mod_base = OTHER; note = 2'-O-methyl modified nucleotide with phosphorothioate linkage
  modified_base 20: mod_base = OTHER; note = 2'-O-methyl modified nucleotide
  misc_feature 1..5: note = RNA
  misc_feature 6..15: note = DNA
  misc_feature 16..20: note = RNA
acgtgcagaggtgaagcgaa

SEQ ID NO: 296 - DNA, 20 bp, synthetic construct
  source 1..20: mol_type = other DNA
  modified_base 1: mod_base = OTHER; note = 2'-O-methoxyethyl modified nucleotide with phosphorothioate linkage
  modified_base 2: mod_base = OTHER; note = 2'-O-methoxyethyl 5-methylcytosine with phosphorothioate linkage
  modified_base 3: mod_base = OTHER; note = 2'-O-methoxyethyl modified nucleotide with phosphorothioate linkage
  modified_base 4: mod_base = OTHER; note = 2'-O-methoxyethyl modified thymine with phosphorothioate linkage
  modified_base 5: mod_base = OTHER; note = 2'-O-methoxyethyl modified nucleotide with phosphorothioate linkage
  modified_base 6: mod_base = OTHER; note = 5-methylcytosine with phosphorothioate linkage
  modified_base 7: mod_base = OTHER; note = Nucleotide with phosphorothioate linkage
  modified_base 8: mod_base = OTHER; note = Nucleotide with phosphorothioate linkage
  modified_base 9: mod_base = OTHER; note = Nucleotide with phosphorothioate linkage
  modified_base 10: mod_base = OTHER; note = Nucleotide with phosphorothioate linkage
  modified_base 11: mod_base = OTHER; note = Nucleotide with phosphorothioate linkage
  modified_base 12: mod_base = OTHER; note = Thymine with phosphorothioate linkage
  modified_base 13: mod_base = OTHER; note = Nucleotide with phosphorothioate linkage
  modified_base 14: mod_base = OTHER; note = Nucleotide with phosphorothioate linkage
  modified_base 15: mod_base = OTHER; note = Nucleotide with phosphorothioate linkage
  modified_base 16: mod_base = OTHER; note = 2'-O-methoxyethyl modified nucleotide with phosphorothioate linkage
  modified_base 17: mod_base = OTHER; note = 2'-O-methoxyethyl 5-methylcytosine with phosphorothioate linkage
  modified_base 18: mod_base = OTHER; note = 2'-O-methyl modified nucleotide with phosphorothioate linkage
  modified_base 19: mod_base = OTHER; note = 2'-O-methyl modified nucleotide with phosphorothioate linkage
  modified_base 20: mod_base = OTHER; note = 2'-O-methyl modified nucleotide
  misc_feature 1..5: note = RNA
  misc_feature 6..15: note = DNA
  misc_feature 16..20: note = RNA
acgtgcagaggtgaagcgaa

SEQ ID NO: 297 - DNA, 20 bp, synthetic construct
  source 1..20: mol_type = other DNA
  modified_base 1: mod_base = OTHER; note = 2'-O-methoxyethyl modified nucleotide with phosphorothioate linkage
  modified_base 2: mod_base = OTHER; note = 2'-O-methoxyethyl 5-methylcytosine with phosphorothioate linkage
  modified_base 3: mod_base = OTHER; note = 2'-O-methoxyethyl modified nucleotide with phosphorothioate linkage
  modified_base 4: mod_base = OTHER; note = 2'-O-methoxyethyl modified thymine with phosphorothioate linkage
  modified_base 5: mod_base = OTHER; note = 2'-O-methyl modified nucleotide with phosphorothioate linkage
  modified_base 6: mod_base = OTHER; note = 2'-O-methyl 5-methylcytosine with phosphorothioate linkage
  modified_base 7: mod_base = OTHER; note = Nucleotide with phosphorothioate linkage
  modified_base 8: mod_base = OTHER; note = Nucleotide with phosphorothioate linkage
  modified_base 9: mod_base = OTHER; note = Nucleotide with phosphorothioate linkage
  modified_base 10: mod_base = OTHER; note = Nucleotide with phosphorothioate linkage
  modified_base 11: mod_base = OTHER; note = Nucleotide with phosphorothioate linkage
  modified_base 12: mod_base = OTHER; note = Thymine with phosphorothioate linkage
  modified_base 13: mod_base = OTHER; note = Nucleotide with phosphorothioate linkage
  modified_base 14: mod_base = OTHER; note = Nucleotide with phosphorothioate linkage
  modified_base 15: mod_base = OTHER; note = Nucleotide with phosphorothioate linkage
  modified_base 16: mod_base = OTHER; note = 2'-O-methoxyethyl modified nucleotide with phosphorothioate linkage
  modified_base 17: mod_base = OTHER; note = 2'-O-methoxyethyl 5-methylcytosine with phosphorothioate linkage
  modified_base 18: mod_base = OTHER; note = 2'-O-methoxyethyl modified nucleotide with phosphorothioate linkage
  modified_base 19: mod_base = OTHER; note = 2'-O-methoxyethyl modified nucleotide with phosphorothioate linkage
  modified_base 20: mod_base = OTHER; note = 2'-O-methoxyethyl modified nucleotide
  misc_feature 1..6: note = RNA
  misc_feature 7..15: note = DNA
  misc_feature 16..20: note = RNA
acgtgcagaggtgaagcgaa

SEQ ID NO: 298 - DNA, 20 bp, synthetic construct
  source 1..20: mol_type = other DNA
  modified_base 1: mod_base = OTHER; note = 2'-O-methoxyethyl modified nucleotide with phosphorothioate linkage
  modified_base 2: mod_base = OTHER; note = 2'-O-methoxyethyl 5-methylcytosine with phosphorothioate linkage
  modified_base 3: mod_base = OTHER; note = 2'-O-methoxyethyl modified nucleotide with phosphorothioate linkage
  modified_base 4: mod_base = OTHER; note = 2'-O-methoxyethyl modified thymine with phosphorothioate linkage
  modified_base 5: mod_base = OTHER; note = 2'-O-methoxyethyl modified nucleotide with phosphorothioate linkage
  modified_base 6: mod_base = OTHER; note = 5-methylcytosine with phosphorothioate linkage
  modified_base 7: mod_base = OTHER; note = Nucleotide with phosphorothioate linkage
  modified_base 8: mod_base = OTHER; note = Nucleotide with phosphorothioate linkage
  modified_base 9: mod_base = OTHER; note = Nucleotide with phosphorothioate linkage
  modified_base 10: mod_base = OTHER; note = Nucleotide with phosphorothioate linkage
  modified_base 11: mod_base = OTHER; note = Nucleotide with phosphorothioate linkage
  modified_base 12: mod_base = OTHER; note = Thymine with phosphorothioate linkage
  modified_base 13: mod_base = OTHER; note = Nucleotide with phosphorothioate linkage
  modified_base 14: mod_base = OTHER; note = Nucleotide with phosphorothioate linkage
  modified_base 15: mod_base = OTHER; note = Nucleotide with phosphorothioate linkage
  modified_base 16: mod_base = OTHER; note = 2'-O-methyl modified nucleotide with phosphorothioate linkage
  modified_base 17: mod_base = OTHER; note = 2'-O-methyl 5-methylcytosine with phosphorothioate linkage
  modified_base 18: mod_base = OTHER; note = 2'-O-methoxyethyl modified nucleotide with phosphorothioate linkage
  modified_base 19: mod_base = OTHER; note = 2'-O-methoxyethyl modified nucleotide with phosphorothioate linkage
  modified_base 20: mod_base = OTHER; note = 2'-O-methoxyethyl modified nucleotide
  misc_feature 1..5: note = RNA
  misc_feature 6..15: note = DNA
  misc_feature 16..20: note = RNA
acgtgcagaggtgaagcgaa

SEQ ID NO: 299 - DNA, 20 bp, synthetic construct
  source 1..20: mol_type = other DNA
  modified_base 1: mod_base = OTHER; note = 2'-O-methoxyethyl modified nucleotide with phosphorothioate linkage
  modified_base 2: mod_base = OTHER; note = 2'-O-methoxyethyl 5-methylcytosine with phosphorothioate linkage
  modified_base 3: mod_base = OTHER; note = 2'-O-methoxyethyl modified nucleotide with phosphorothioate linkage
  modified_base 4: mod_base = OTHER; note = 2'-O-methoxyethyl modified thymine with phosphorothioate linkage
  modified_base 5: mod_base = OTHER; note = 2'-O-methoxyethyl modified nucleotide with phosphorothioate linkage
  modified_base 6: mod_base = OTHER; note = 5-methylcytosine with phosphorothioate linkage
  modified_base 7: mod_base = OTHER; note = Nucleotide with phosphorothioate linkage
  modified_base 8: mod_base = OTHER; note = Nucleotide with phosphorothioate linkage
  modified_base 9: mod_base = OTHER; note = Nucleotide with phosphorothioate linkage
  modified_base 10: mod_base = OTHER; note = Nucleotide with phosphorothioate linkage
  modified_base 11: mod_base = OTHER; note = Nucleotide with phosphorothioate linkage
  modified_base 12: mod_base = OTHER; note = Thymine with phosphorothioate linkage
  modified_base 13: mod_base = OTHER; note = Nucleotide with phosphorothioate linkage
  modified_base 14: mod_base = OTHER; note = Nucleotide with phosphorothioate linkage
  modified_base 15: mod_base = OTHER; note = Nucleotide with phosphorothioate linkage
  modified_base 16: mod_base = OTHER; note = 2'-O-methyl modified nucleotide with phosphorothioate linkage
  modified_base 17: mod_base = OTHER; note = 2'-O-methyl 5-methylcytosine with phosphorothioate linkage
  modified_base 18: mod_base = OTHER; note = 2'-O-methyl modified nucleotide with phosphorothioate linkage
  modified_base 19: mod_base = OTHER; note = 2'-O-methoxyethyl modified nucleotide with phosphorothioate linkage
  modified_base 20: mod_base = OTHER; note = 2'-O-methoxyethyl modified nucleotide
  misc_feature 1..5: note = RNA
  misc_feature 6..15: note = DNA
  misc_feature 16..20: note = RNA
acgtgcagaggtgaagcgaa

SEQ ID NO: 300 - DNA, 20 bp, synthetic construct
  source 1..20: mol_type = other DNA
  modified_base 1: mod_base = OTHER; note = 2'-O-methoxyethyl modified nucleotide with phosphorothioate linkage
  modified_base 2: mod_base = OTHER; note = 2'-O-methoxyethyl 5-methylcytosine with phosphorothioate linkage
  modified_base 3: mod_base = OTHER; note = 2'-O-methoxyethyl modified nucleotide with phosphorothioate linkage
  modified_base 4: mod_base = OTHER; note = 2'-O-methoxyethyl modified thymine with phosphorothioate linkage
  modified_base 5: mod_base = OTHER; note = 2'-O-methyl modified nucleotide with phosphorothioate linkage
  modified_base 6: mod_base = OTHER; note = 2'-O-methyl 5-methylcytosine with phosphorothioate linkage
  modified_base 7: mod_base = OTHER; note = 2'-O-methyl modified nucleotide with phosphorothioate linkage
  modified_base 8: mod_base = OTHER; note = Nucleotide with phosphorothioate linkage
  modified_base 9: mod_base = OTHER; note = Nucleotide with phosphorothioate linkage
  modified_base 10: mod_base = OTHER; note = Nucleotide with phosphorothioate linkage
  modified_base 11: mod_base = OTHER; note = Nucleotide with phosphorothioate linkage
  modified_base 12: mod_base = OTHER; note = Thymine with phosphorothioate linkage
  modified_base 13: mod_base = OTHER; note = Nucleotide with phosphorothioate linkage
  modified_base 14: mod_base = OTHER; note = Nucleotide with phosphorothioate linkage
  modified_base 15: mod_base = OTHER; note = Nucleotide with phosphorothioate linkage
  modified_base 16: mod_base = OTHER; note = 2'-O-methoxyethyl modified nucleotide with phosphorothioate linkage
  modified_base 17: mod_base = OTHER; note = 2'-O-methoxyethyl 5-methylcytosine with phosphorothioate linkage
  modified_base 18: mod_base = OTHER; note = 2'-O-methoxyethyl modified nucleotide with phosphorothioate linkage
  modified_base 19: mod_base = OTHER; note = 2'-O-methoxyethyl modified nucleotide with phosphorothioate linkage
  modified_base 20: mod_base = OTHER; note = 2'-O-methoxyethyl modified nucleotide
  misc_feature 1..7: note = RNA
  misc_feature 8..15: note = DNA
  misc_feature 16..20: note = RNA
acgtgcagaggtgaagcgaa

SEQ ID NO: 301 - DNA, 20 bp, synthetic construct
  source 1..20: mol_type = other DNA
  modified_base 1: mod_base = OTHER; note = 2'-O-methoxyethyl 5-methylcytosine with phosphorothioate linkage
  modified_base 2: mod_base = OTHER; note = 2'-O-methoxyethyl modified nucleotide with phosphorothioate linkage
  modified_base 3: mod_base = OTHER; note = 2'-O-methoxyethyl modified nucleotide with phosphorothioate linkage
  modified_base 4: mod_base = OTHER; note = 2'-O-methoxyethyl modified nucleotide with phosphorothioate linkage
  modified_base 5: mod_base = OTHER; note = 2'-O-methoxyethyl modified nucleotide with phosphorothioate linkage
  modified_base 6: mod_base = OTHER; note = 2'-O-cyclopropyl modified nucleotide with phosphorothioate linkage
  modified_base 7: mod_base = OTHER; note = Thymine with phosphorothioate linkage
  modified_base 8: mod_base = OTHER; note = Nucleotide with phosphorothioate linkage
  modified_base 9: mod_base = OTHER; note = Nucleotide with phosphorothioate linkage
  modified_base 10: mod_base = OTHER; note = Nucleotide with phosphorothioate linkage
  modified_base 11: mod_base = OTHER; note = Nucleotide with phosphorothioate linkage
  modified_base 12: mod_base = OTHER; note = 5-methylcytosine with phosphorothioate linkage
  modified_base 13: mod_base = OTHER; note = Nucleotide with phosphorothioate linkage
  modified_base 14: mod_base = OTHER; note = Nucleotide with phosphorothioate linkage
  modified_base 15: mod_base = OTHER; note = Nucleotide with phosphorothioate linkage
  modified_base 16: mod_base = OTHER; note = 2'-O-methoxyethyl modified nucleotide with phosphorothioate linkage
  modified_base 17: mod_base = OTHER; note = 2'-O-methoxyethyl modified thymine with phosphorothioate linkage
  modified_base 18: mod_base = OTHER; note = 2'-O-methoxyethyl modified nucleotide with phosphorothioate linkage
  modified_base 19: mod_base = OTHER; note = 2'-O-methoxyethyl 5-methylcytosine with phosphorothioate linkage
  modified_base 20: mod_base = OTHER; note = 2'-O-methoxyethyl modified nucleotide
  misc_feature 1..6: note = RNA
  misc_feature 7..15: note = DNA
  misc_feature 16..20: note = RNA
cagaggtgaagcgaagtgca

SEQ ID NO: 302 - DNA, 20 bp, synthetic construct
  source 1..20: mol_type = other DNA
  modified_base 1: mod_base = OTHER; note = 2'-O-methoxyethyl 5-methylcytosine with phosphorothioate linkage
  modified_base 2: mod_base = OTHER; note = 2'-O-methoxyethyl modified nucleotide with phosphorothioate linkage
  modified_base 3: mod_base = OTHER; note = 2'-O-methoxyethyl modified nucleotide with phosphorothioate linkage
  modified_base 4: mod_base = OTHER; note = 2'-O-methoxyethyl modified nucleotide with phosphorothioate linkage
  modified_base 5: mod_base = OTHER; note = 2'-O-methoxyethyl modified nucleotide with phosphorothioate linkage
  modified_base 6: mod_base = OTHER; note = Nucleotide with phosphorothioate linkage
  modified_base 7: mod_base = OTHER; note = 2'-O-cyclopropyl modified nucleotide with phosphorothioate linkage
  modified_base 8: mod_base = OTHER; note = Nucleotide with phosphorothioate linkage
  modified_base 9: mod_base = OTHER; note = Nucleotide with phosphorothioate linkage
  modified_base 10: mod_base = OTHER; note = Nucleotide with phosphorothioate linkage
  modified_base 11: mod_base = OTHER; note = Nucleotide with phosphorothioate linkage
  modified_base 12: mod_base = OTHER; note = 5-methylcytosine with phosphorothioate linkage
  modified_base 13: mod_base = OTHER; note = Nucleotide with phosphorothioate linkage
  modified_base 14: mod_base = OTHER; note = Nucleotide with phosphorothioate linkage
  modified_base 15: mod_base = OTHER; note = Nucleotide with phosphorothioate linkage
  modified_base 16: mod_base = OTHER; note = 2'-O-methoxyethyl modified nucleotide with phosphorothioate linkage
  modified_base 17: mod_base = OTHER; note = 2'-O-methoxyethyl modified thymine with phosphorothioate linkage
  modified_base 18: mod_base = OTHER; note = 2'-O-methoxyethyl modified nucleotide with phosphorothioate linkage
  modified_base 19: mod_base = OTHER; note = 2'-O-methoxyethyl 5-methylcytosine with phosphorothioate linkage
  modified_base 20: mod_base = OTHER; note = 2'-O-methoxyethyl modified nucleotide
  misc_feature 1..5: note = RNA
  misc_feature 6: note = DNA
  misc_feature 7: note = RNA
  misc_feature 8..15: note = DNA
  misc_feature 16..20: note = RNA
cagaggtgaagcgaagtgca

SEQ ID NO: 303 - DNA, 20 bp, synthetic construct
  source 1..20: mol_type = other DNA
  modified_base 1: mod_base = OTHER; note = 2'-O-methoxyethyl 5-methylcytosine with phosphorothioate linkage
  modified_base 2: mod_base = OTHER; note = 2'-O-methoxyethyl modified nucleotide with phosphorothioate linkage
  modified_base 3: mod_base = OTHER; note = 2'-O-methoxyethyl modified nucleotide with phosphorothioate linkage
  modified_base 4: mod_base = OTHER; note = 2'-O-methoxyethyl modified nucleotide with phosphorothioate linkage
  modified_base 5: mod_base = OTHER; note = 2'-O-methoxyethyl modified nucleotide with phosphorothioate linkage
  modified_base 6: mod_base = OTHER; note = Nucleotide with phosphorothioate linkage
  modified_base 7: mod_base = OTHER; note = Thymine with phosphorothioate linkage
  modified_base 8: mod_base = OTHER; note = 2'-O-cyclopropyl modified nucleotide with phosphorothioate linkage
  modified_base 9: mod_base = OTHER; note = Nucleotide with phosphorothioate linkage
  modified_base 10: mod_base = OTHER; note = Nucleotide with phosphorothioate linkage
  modified_base 11: mod_base = OTHER; note = Nucleotide with phosphorothioate linkage
  modified_base 12: mod_base = OTHER; note = 5-methylcytosine with phosphorothioate linkage
  modified_base 13: mod_base = OTHER; note = Nucleotide with phosphorothioate linkage
  modified_base 14: mod_base = OTHER; note = Nucleotide with phosphorothioate linkage
  modified_base 15: mod_base = OTHER; note = Nucleotide with phosphorothioate linkage
  modified_base 16: mod_base = OTHER; note = 2'-O-methoxyethyl modified nucleotide with phosphorothioate linkage
  modified_base 17: mod_base = OTHER; note = 2'-O-methoxyethyl modified thymine with phosphorothioate linkage
  modified_base 18: mod_base = OTHER; note = 2'-O-methoxyethyl modified nucleotide with phosphorothioate linkage
  modified_base 19: mod_base = OTHER; note = 2'-O-methoxyethyl 5-methylcytosine with phosphorothioate linkage
  modified_base 20: mod_base = OTHER; note = 2'-O-methoxyethyl modified nucleotide
  misc_feature 1..5: note = RNA
  misc_feature 6..7: note = DNA
  misc_feature 8: note = RNA
  misc_feature 9..15: note = DNA
  misc_feature 16..20: note = RNA
cagaggtgaagcgaagtgca

SEQ ID NO: 304 - DNA, 20 bp, synthetic construct
  source 1..20: mol_type = other DNA
  modified_base 1: mod_base = OTHER; note = 2'-O-methoxyethyl 5-methylcytosine with phosphorothioate linkage
  modified_base 2: mod_base = OTHER; note = 2'-O-methoxyethyl modified nucleotide with phosphorothioate linkage
  modified_base 3: mod_base = OTHER; note = 2'-O-methoxyethyl modified nucleotide with phosphorothioate linkage
  modified_base 4: mod_base = OTHER; note = 2'-O-methoxyethyl modified nucleotide with phosphorothioate linkage
  modified_base 5: mod_base = OTHER; note = 2'-O-methoxyethyl modified nucleotide with phosphorothioate linkage
  modified_base 6: mod_base = OTHER; note = 2'-O-methylcyclopropyl modified nucleotide with phosphorothioate linkage
  modified_base 7: mod_base = OTHER; note = Thymine with phosphorothioate linkage
  modified_base 8: mod_base = OTHER; note = Nucleotide with phosphorothioate linkage
  modified_base 9: mod_base = OTHER; note = Nucleotide with phosphorothioate linkage
  modified_base 10: mod_base = OTHER; note = Nucleotide with phosphorothioate linkage
  modified_base 11: mod_base = OTHER; note = Nucleotide with phosphorothioate linkage
  modified_base 12: mod_base = OTHER; note = 5-methylcytosine with phosphorothioate linkage
  modified_base 13: mod_base = OTHER; note = Nucleotide with phosphorothioate linkage
  modified_base 14: mod_base = OTHER; note = Nucleotide with phosphorothioate linkage
  modified_base 15: mod_base = OTHER; note = Nucleotide with phosphorothioate linkage
  modified_base 16: mod_base = OTHER; note = 2'-O-methoxyethyl modified nucleotide with phosphorothioate linkage
  modified_base 17: mod_base = OTHER; note = 2'-O-methoxyethyl modified thymine with phosphorothioate linkage
  modified_base 18: mod_base = OTHER; note = 2'-O-methoxyethyl modified nucleotide with phosphorothioate linkage
  modified_base 19: mod_base = OTHER; note = 2'-O-methoxyethyl 5-methylcytosine with phosphorothioate linkage
  modified_base 20: mod_base = OTHER; note = 2'-O-methoxyethyl modified nucleotide
  misc_feature 1..6: note = RNA
  misc_feature 7..15: note = DNA
  misc_feature 16..20: note = RNA
cagaggtgaagcgaagtgca

SEQ ID NO: 305 - DNA, 20 bp, synthetic construct
  source 1..20: mol_type = other DNA
  modified_base 1: mod_base = OTHER; note = 2'-O-methoxyethyl 5-methylcytosine with phosphorothioate linkage
  modified_base 2: mod_base = OTHER; note = 2'-O-methoxyethyl modified nucleotide with phosphorothioate linkage
  modified_base 3: mod_base = OTHER; note = 2'-O-methoxyethyl modified nucleotide with phosphorothioate linkage
  modified_base 4: mod_base = OTHER; note = 2'-O-methoxyethyl modified nucleotide with phosphorothioate linkage
  modified_base 5: mod_base = OTHER; note = 2'-O-methoxyethyl modified nucleotide with phosphorothioate linkage
  modified_base 6: mod_base = OTHER; note = Nucleotide with phosphorothioate linkage
  modified_base 7: mod_base = OTHER; note = 2'-O-methylcyclopropyl modified nucleotide with phosphorothioate linkage
  modified_base 8: mod_base = OTHER; note = Nucleotide with phosphorothioate linkage
  modified_base 9: mod_base = OTHER; note = Nucleotide with phosphorothioate linkage
  modified_base 10: mod_base = OTHER; note = Nucleotide with phosphorothioate linkage
  modified_base 11: mod_base = OTHER; note = Nucleotide with phosphorothioate linkage
  modified_base 12: mod_base = OTHER; note = 5-methylcytosine with phosphorothioate linkage
  modified_base 13: mod_base = OTHER; note = Nucleotide with phosphorothioate linkage
  modified_base 14: mod_base = OTHER; note = Nucleotide with phosphorothioate linkage
  modified_base 15: mod_base = OTHER; note = Nucleotide with phosphorothioate linkage
  modified_base 16: mod_base = OTHER; note = 2'-O-methoxyethyl modified nucleotide with phosphorothioate linkage
  modified_base 17: mod_base = OTHER; note = 2'-O-methoxyethyl modified thymine with phosphorothioate linkage
  modified_base 18: mod_base = OTHER; note = 2'-O-methoxyethyl modified nucleotide with phosphorothioate linkage
  modified_base 19: mod_base = OTHER; note = 2'-O-methoxyethyl 5-methylcytosine with phosphorothioate linkage
  modified_base 20: mod_base = OTHER; note = 2'-O-methoxyethyl modified nucleotide
  misc_feature 1..5: note = RNA
  misc_feature 6: note = DNA
  misc_feature 7: note = RNA
  misc_feature 8..15: note = DNA
  misc_feature 16..20: note = RNA
cagaggtgaagcgaagtgca

SEQ ID NO: 306 - DNA, 20 bp, synthetic construct
  source 1..20: mol_type = other DNA
  modified_base 1: mod_base = OTHER; note = 2'-O-methoxyethyl 5-methylcytosine with phosphorothioate linkage
  modified_base 2: mod_base = OTHER; note = 2'-O-methoxyethyl modified nucleotide with phosphorothioate linkage
  modified_base 3: mod_base = OTHER; note = 2'-O-methoxyethyl modified nucleotide with phosphorothioate linkage
  modified_base 4: mod_base = OTHER; note = 2'-O-methoxyethyl modified nucleotide with phosphorothioate linkage
  modified_base 5: mod_base = OTHER; note = 2'-O-methoxyethyl modified nucleotide with phosphorothioate linkage
  modified_base 6: mod_base = OTHER; note = Nucleotide with phosphorothioate linkage
  modified_base 7: mod_base = OTHER; note = Thymine with phosphorothioate linkage
  modified_base 8: mod_base = OTHER; note = 2'-O-methylcyclopropyl modified nucleotide with phosphorothioate linkage
  modified_base 9: mod_base = OTHER; note = Nucleotide with phosphorothioate linkage
  modified_base 10: mod_base = OTHER; note = Nucleotide with phosphorothioate linkage
  modified_base 11: mod_base = OTHER; note = Nucleotide with phosphorothioate linkage
  modified_base 12: mod_base = OTHER; note = 5-methylcytosine with phosphorothioate linkage
  modified_base 13: mod_base = OTHER; note = Nucleotide with phosphorothioate linkage
  modified_base 14: mod_base = OTHER; note = Nucleotide with phosphorothioate linkage
  modified_base 15: mod_base = OTHER; note = Nucleotide with phosphorothioate linkage
  modified_base 16: mod_base = OTHER; note = 2'-O-methoxyethyl modified nucleotide with phosphorothioate linkage
  modified_base 17: mod_base = OTHER; note = 2'-O-methoxyethyl modified thymine with phosphorothioate linkage
  modified_base 18: mod_base = OTHER; note = 2'-O-methoxyethyl modified nucleotide with phosphorothioate linkage
  modified_base 19: mod_base = OTHER; note = 2'-O-methoxyethyl 5-methylcytosine with phosphorothioate linkage
  modified_base 20: mod_base = OTHER; note = 2'-O-methoxyethyl modified nucleotide
  misc_feature 1..5: note = RNA
  misc_feature 6..7: note = DNA
  misc_feature 8: note = RNA
  misc_feature 9..15: note = DNA
  misc_feature 16..20: note = RNA
cagaggtgaagcgaagtgca

SEQ ID NO: 307 - DNA, 20 bp, synthetic construct
  source 1..20: mol_type = other DNA
  modified_base 1: mod_base = OTHER; note = 2'-O-methoxyethyl 5-methylcytosine with phosphorothioate linkage
  modified_base 2: mod_base = OTHER; note = 2'-O-methoxyethyl modified nucleotide with phosphorothioate linkage
  modified_base 3: mod_base = OTHER; note = 2'-O-methoxyethyl modified nucleotide with phosphorothioate linkage
  modified_base 4: mod_base = OTHER; note = 2'-O-methoxyethyl modified nucleotide with phosphorothioate linkage
  modified_base 5: mod_base = OTHER; note = 2'-O-methoxyethyl modified nucleotide with phosphorothioate linkage
  modified_base 6: mod_base = OTHER; note = Nucleotide with phosphorothioate linkage
  modified_base 7: mod_base = OTHER; note = Thymine with phosphorothioate linkage
  modified_base 8: mod_base = OTHER; note = Nucleotide with phosphorothioate linkage
  modified_base 9: mod_base = OTHER; note = Nucleotide with phosphorothioate linkage
  modified_base 10: mod_base = OTHER; note = Nucleotide with phosphorothioate linkage
  modified_base 11: mod_base = OTHER; note = Nucleotide with phosphorothioate linkage
  modified_base 12: mod_base = OTHER; note = 5-methylcytosine with phosphorothioate linkage
  modified_base 13: mod_base = OTHER; note = Nucleotide with phosphorothioate linkage
  modified_base 14: mod_base = OTHER; note = Nucleotide with phosphorothioate linkage
  modified_base 15: mod_base = OTHER; note = Nucleotide with phosphorothioate linkage
  modified_base 16: mod_base = OTHER; note = 2'-O-methoxyethyl modified nucleotide with phosphorothioate linkage
  modified_base 17: mod_base = OTHER; note = 2'-O-methoxyethyl modified thymine with phosphorothioate linkage
  modified_base 18: mod_base = OTHER; note = 2'-O-methoxyethyl modified nucleotide with phosphorothioate linkage
  modified_base 19: mod_base = OTHER; note = 2'-O-methoxyethyl 5-methylcytosine with phosphorothioate linkage
  modified_base 20: mod_base = OTHER; note = 2'-O-methoxyethyl modified nucleotide
  misc_feature 1..5: note = RNA
  misc_feature 6..15: note = DNA
  misc_feature 16..20: note = RNA
cagaggtgaagcgaagtgca

SEQ ID NO: 308 - DNA, 20 bp, synthetic construct
  source 1..20: mol_type = other DNA
  modified_base 1: mod_base = OTHER; note = 2'-O-methoxyethyl 5-methylcytosine with phosphorothioate linkage
  modified_base 2: mod_base = OTHER; note = 2'-O-methoxyethyl modified nucleotide with phosphorothioate linkage
  modified_base 3: mod_base = OTHER; note = 2'-O-methoxyethyl modified nucleotide with phosphorothioate linkage
  modified_base 4: mod_base = OTHER; note = 2'-O-methoxyethyl modified nucleotide with phosphorothioate linkage
  modified_base 5: mod_base = OTHER; note = 2'-O-methoxyethyl modified nucleotide with phosphorothioate linkage
  modified_base 6: mod_base = OTHER; note = Nucleotide with phosphorothioate linkage
  modified_base 7: mod_base = OTHER; note = 2'-O-methyl-3'-xylo modified nucleotide with phosphorothioate linkage
  modified_base 8: mod_base = OTHER; note = Nucleotide with phosphorothioate linkage
  modified_base 9: mod_base = OTHER; note = Nucleotide with phosphorothioate linkage
  modified_base 10: mod_base = OTHER; note = Nucleotide with phosphorothioate linkage
  modified_base 11: mod_base = OTHER; note = Nucleotide with phosphorothioate linkage
  modified_base 12: mod_base = OTHER; note = 5-methylcytosine with phosphorothioate linkage
  modified_base 13: mod_base = OTHER; note = Nucleotide with phosphorothioate linkage
  modified_base 14: mod_base = OTHER; note = Nucleotide with phosphorothioate linkage
  modified_base 15: mod_base = OTHER; note = Nucleotide with phosphorothioate linkage
  modified_base 16: mod_base = OTHER; note = 2'-O-methoxyethyl modified nucleotide with phosphorothioate linkage
  modified_base 17: mod_base = OTHER; note = 2'-O-methoxyethyl modified thymine with phosphorothioate linkage
  modified_base 18: mod_base = OTHER; note = 2'-O-methoxyethyl modified nucleotide with phosphorothioate linkage
  modified_base 19: mod_base = OTHER; note = 2'-O-methoxyethyl 5-methylcytosine with phosphorothioate linkage
  modified_base 20: mod_base = OTHER; note = 2'-O-methoxyethyl modified nucleotide
  misc_feature 1..5: note = RNA
  misc_feature 6: note = DNA
  misc_feature 7: note = RNA
  misc_feature 8..15: note = DNA
  misc_feature 16..20: note = RNA
cagaggtgaagcgaagtgca

SEQ ID NO: 309 - DNA, 20 bp, synthetic construct
  source 1..20: mol_type = other DNA
  modified_base 1: mod_base = OTHER; note = 2'-O-methoxyethyl 5-methylcytosine with phosphorothioate linkage
  modified_base 2: mod_base = OTHER; note = 2'-O-methoxyethyl modified nucleotide with phosphorothioate linkage
  modified_base 3: mod_base = OTHER; note = 2'-O-methoxyethyl modified nucleotide with phosphorothioate linkage
  modified_base 4: mod_base = OTHER; note = 2'-O-methoxyethyl modified nucleotide with phosphorothioate linkage
  modified_base 5: mod_base = OTHER; note = 2'-O-methoxyethyl modified nucleotide with phosphorothioate linkage
  modified_base 6: mod_base = OTHER; note = Nucleotide with phosphorothioate linkage
  modified_base 7: mod_base = OTHER; note = Thymine with phosphorothioate linkage
  modified_base 8: mod_base = OTHER; note = 2'-O-methyl-3'-xylo modified nucleotide with phosphorothioate linkage
  modified_base 9: mod_base = OTHER; note = Nucleotide with phosphorothioate linkage
  modified_base 10: mod_base = OTHER; note = Nucleotide with phosphorothioate linkage
  modified_base 11: mod_base = OTHER; note = Nucleotide with phosphorothioate linkage
  modified_base 12: mod_base = OTHER; note = 5-methylcytosine with phosphorothioate linkage
  modified_base 13: mod_base = OTHER; note = Nucleotide with phosphorothioate linkage
  modified_base 14: mod_base = OTHER; note = Nucleotide with phosphorothioate linkage
  modified_base 15: mod_base = OTHER; note = Nucleotide with phosphorothioate linkage
  modified_base 16: mod_base = OTHER; note = 2'-O-methoxyethyl modified nucleotide with phosphorothioate linkage
  modified_base 17: mod_base = OTHER; note = 2'-O-methoxyethyl modified thymine with phosphorothioate linkage
  modified_base 18: mod_base = OTHER; note = 2'-O-methoxyethyl modified nucleotide with phosphorothioate linkage
  modified_base 19: mod_base = OTHER; note = 2'-O-methoxyethyl 5-methylcytosine with phosphorothioate linkage
  modified_base 20: mod_base = OTHER; note = 2'-O-methoxyethyl modified nucleotide
  misc_feature 1..5: note = RNA
  misc_feature 6..7: note = DNA
  misc_feature 8: note = RNA
  misc_feature 9..15: note = DNA
  misc_feature 16..20: note = RNA
cagaggtgaagcgaagtgca

SEQ ID NO: 310 - DNA, 20 bp, synthetic construct
  source 1..20: mol_type = other DNA
  modified_base 1: mod_base = OTHER; note = 2'-O-methoxyethyl modified nucleotide with phosphorothioate linkage
  modified_base 2: mod_base = OTHER; note = 2'-O-methoxyethyl 5-methylcytosine with phosphorothioate linkage
  modified_base 3: mod_base = OTHER; note = 2'-O-methoxyethyl modified nucleotide with phosphorothioate linkage
  modified_base 4: mod_base = OTHER; note = 2'-O-methoxyethyl modified thymine with phosphorothioate linkage
  modified_base 5: mod_base = OTHER; note = 2'-O-methoxyethyl modified nucleotide with phosphorothioate linkage
  modified_base 6: mod_base = OTHER; note = 2'-O-cyclopropyl modified nucleotide with phosphorothioate linkage
  modified_base 7: mod_base = OTHER; note = Nucleotide with phosphorothioate linkage
  modified_base 8: mod_base = OTHER; note = Nucleotide with phosphorothioate linkage
  modified_base 9: mod_base = OTHER; note = Nucleotide with phosphorothioate linkage
  modified_base 10: mod_base = OTHER; note = Nucleotide with phosphorothioate linkage
  modified_base 11: mod_base = OTHER; note = Nucleotide with phosphorothioate linkage
  modified_base 12: mod_base = OTHER; note = Thymine with phosphorothioate linkage
  modified_base 13: mod_base = OTHER; note = Nucleotide with phosphorothioate linkage
  modified_base 14: mod_base = OTHER; note = Nucleotide with phosphorothioate linkage
  modified_base 15: mod_base = OTHER; note = Nucleotide with phosphorothioate linkage
  modified_base 16: mod_base = OTHER; note = 2'-O-methoxyethyl modified nucleotide with phosphorothioate linkage
  modified_base 17: mod_base = OTHER; note = 2'-O-methoxyethyl 5-methylcytosine with phosphorothioate linkage
  modified_base 18: mod_base = OTHER; note = 2'-O-methoxyethyl modified nucleotide with phosphorothioate linkage
  modified_base 19: mod_base = OTHER; note = 2'-O-methoxyethyl modified nucleotide with phosphorothioate linkage
  modified_base 20: mod_base = OTHER; note = 2'-O-methoxyethyl modified nucleotide
  misc_feature 1..6: note = RNA
  misc_feature 7..15: note = DNA
  misc_feature 16..20: note = RNA
acgtgcagaggtgaagcgaa

SEQ ID NO: 311 - DNA, 20 bp, synthetic construct
  source 1..20: mol_type = other DNA
  modified_base 1: mod_base = OTHER; note = 2'-O-methoxyethyl modified nucleotide with phosphorothioate linkage
  modified_base 2: mod_base = OTHER; note = 2'-O-methoxyethyl 5-methylcytosine with phosphorothioate linkage
  modified_base 3: mod_base = OTHER; note = 2'-O-methoxyethyl modified nucleotide with phosphorothioate linkage
  modified_base 4: mod_base = OTHER; note = 2'-O-methoxyethyl modified thymine with phosphorothioate linkage
  modified_base 5: mod_base = OTHER; note = 2'-O-methoxyethyl modified nucleotide with phosphorothioate linkage
  modified_base 6: mod_base = OTHER; note = 5-methylcytosine with phosphorothioate linkage
  modified_base 7: mod_base = OTHER; note = 2'-O-cyclopropyl modified nucleotide with phosphorothioate linkage
  modified_base 8: mod_base = OTHER; note = Nucleotide with phosphorothioate linkage
  modified_base 9: mod_base = OTHER; note = Nucleotide with phosphorothioate linkage
  modified_base 10: mod_base = OTHER; note = Nucleotide with phosphorothioate linkage
  modified_base 11: mod_base = OTHER; note = Nucleotide with phosphorothioate linkage
  modified_base 12: mod_base = OTHER; note = Thymine with phosphorothioate linkage
  modified_base 13: mod_base = OTHER; note = Nucleotide with phosphorothioate linkage
  modified_base 14: mod_base = OTHER; note = Nucleotide with phosphorothioate linkage
  modified_base 15: mod_base = OTHER; note = Nucleotide with phosphorothioate linkage
  modified_base 16: mod_base = OTHER; note = 2'-O-methoxyethyl modified nucleotide with phosphorothioate linkage
  modified_base 17: mod_base = OTHER; note = 2'-O-methoxyethyl 5-methylcytosine with phosphorothioate linkage
  modified_base 18: mod_base = OTHER; note = 2'-O-methoxyethyl modified nucleotide with phosphorothioate linkage
  modified_base 19: mod_base = OTHER; note = 2'-O-methoxyethyl modified nucleotide with phosphorothioate linkage
  modified_base 20: mod_base = OTHER; note = 2'-O-methoxyethyl modified nucleotide
  misc_feature 1..5: note = RNA
  misc_feature 6: note = DNA
  misc_feature 7: note = RNA
  misc_feature 8..15: note = DNA
  misc_feature 16..20: note = RNA
acgtgcagaggtgaagcgaa

SEQ ID NO: 312 - DNA, 20 bp, synthetic construct
  source 1..20: mol_type = other DNA
  modified_base 1: mod_base = OTHER; note = 2'-O-methoxyethyl modified nucleotide with phosphorothioate linkage
  modified_base 2: mod_base = OTHER; note = 2'-O-methoxyethyl 5-methylcytosine with phosphorothioate linkage
  modified_base 3: mod_base = OTHER; note = 2'-O-methoxyethyl modified nucleotide with phosphorothioate linkage
  modified_base 4: mod_base = OTHER; note = 2'-O-methoxyethyl modified thymine with phosphorothioate linkage
  modified_base 5: mod_base = OTHER; note = 2'-O-methoxyethyl modified nucleotide with phosphorothioate linkage
  modified_base 6: mod_base = OTHER; note = 5-methylcytosine with phosphorothioate linkage
  modified_base 7: mod_base = OTHER; note = Nucleotide with phosphorothioate linkage
  modified_base 8: mod_base = OTHER; note = 2'-O-cyclopropyl modified nucleotide with phosphorothioate linkage
  modified_base 9: mod_base = OTHER; note = Nucleotide with phosphorothioate linkage
  modified_base 10: mod_base = OTHER; note = Nucleotide with phosphorothioate linkage
  modified_base 11: mod_base = OTHER; note = Nucleotide with phosphorothioate linkage
  modified_base 12: mod_base = OTHER; note = Thymine with phosphorothioate linkage
  modified_base 13: mod_base = OTHER; note = Nucleotide with phosphorothioate linkage
  modified_base 14: mod_base = OTHER; note = Nucleotide with phosphorothioate linkage
  modified_base 15: mod_base = OTHER; note = Nucleotide with phosphorothioate linkage
  modified_base 16: mod_base = OTHER; note = 2'-O-methoxyethyl modified nucleotide with phosphorothioate linkage
  modified_base 17: mod_base = OTHER; note = 2'-O-methoxyethyl 5-methylcytosine with phosphorothioate linkage
  modified_base 18: mod_base = OTHER; note = 2'-O-methoxyethyl modified nucleotide with phosphorothioate linkage
  modified_base 19: mod_base = OTHER; note = 2'-O-methoxyethyl modified nucleotide with phosphorothioate linkage
  modified_base 20: mod_base = OTHER; note = 2'-O-methoxyethyl modified nucleotide
  misc_feature 1..5: note = RNA
  misc_feature 6..7: note = DNA
  misc_feature 8: note = RNA
  misc_feature 9..15: note = DNA
  misc_feature 16..20: note = RNA
acgtgcagaggtgaagcgaa

SEQ ID NO: 313 - DNA, 20 bp, synthetic construct
  source 1..20: mol_type = other DNA
  modified_base 1: mod_base = OTHER; note = 2'-O-methoxyethyl modified nucleotide with phosphorothioate linkage
  modified_base 2: mod_base = OTHER; note = 2'-O-methoxyethyl 5-methylcytosine with phosphorothioate linkage
  modified_base 3: mod_base = OTHER; note = 2'-O-methoxyethyl modified nucleotide with phosphorothioate linkage
  modified_base 4: mod_base = OTHER; note = 2'-O-methoxyethyl modified thymine with phosphorothioate linkage
  modified_base 5: mod_base = OTHER; note = 2'-O-methoxyethyl modified nucleotide with phosphorothioate linkage
  modified_base 6: mod_base = OTHER; note = 2'-O-methylcyclopropyl modified nucleotide with phosphorothioate linkage
  modified_base 7: mod_base = OTHER; note = Nucleotide with phosphorothioate linkage
  modified_base 8: mod_base = OTHER; note = Nucleotide with phosphorothioate linkage
  modified_base 9: mod_base = OTHER; note = Nucleotide with phosphorothioate linkage
  modified_base 10: mod_base = OTHER; note = Nucleotide with phosphorothioate linkage
  modified_base 11: mod_base = OTHER; note = Nucleotide with phosphorothioate linkage
  modified_base 12: mod_base = OTHER; note = Thymine with phosphorothioate linkage
  modified_base 13: mod_base = OTHER; note = Nucleotide with phosphorothioate linkage
  modified_base 14: mod_base = OTHER; note = Nucleotide with phosphorothioate linkage
  modified_base 15: mod_base = OTHER; note = Nucleotide with phosphorothioate linkage
  modified_base 16: mod_base = OTHER; note = 2'-O-methoxyethyl modified nucleotide with phosphorothioate linkage
  modified_base 17: mod_base = OTHER; note = 2'-O-methoxyethyl 5-methylcytosine with phosphorothioate linkage
  modified_base 18: mod_base = OTHER; note = 2'-O-methoxyethyl modified nucleotide with phosphorothioate linkage
  modified_base 19: mod_base = OTHER; note = 2'-O-methoxyethyl modified nucleotide with phosphorothioate linkage
  modified_base 20: mod_base = OTHER; note = 2'-O-methoxyethyl modified nucleotide
  misc_feature 1..6: note = RNA
  misc_feature 7..15: note = DNA
  misc_feature 16..20: note = RNA
acgtgcagaggtgaagcgaa

SEQ ID NO: 314 - DNA, 20 bp, synthetic construct
  source 1..20: mol_type = other DNA
  modified_base 1: mod_base = OTHER; note = 2'-O-methoxyethyl modified nucleotide with phosphorothioate linkage
  modified_base 2: mod_base = OTHER; note = 2'-O-methoxyethyl 5-methylcytosine with phosphorothioate linkage
  modified_base 3: mod_base = OTHER; note = 2'-O-methoxyethyl modified nucleotide with phosphorothioate linkage
  modified_base 4: mod_base = OTHER; note = 2'-O-methoxyethyl modified thymine with phosphorothioate linkage
  modified_base 5: mod_base = OTHER; note = 2'-O-methoxyethyl modified nucleotide with phosphorothioate linkage
  modified_base 6: mod_base = OTHER; note = 5-methylcytosine with phosphorothioate linkage
  modified_base 7: mod_base = OTHER; note = 2'-O-methylcyclopropyl modified nucleotide with phosphorothioate linkage
  modified_base 8: mod_base = OTHER; note = Nucleotide with phosphorothioate linkage
  modified_base 9: mod_base = OTHER; note = Nucleotide with phosphorothioate linkage
  modified_base 10: mod_base = OTHER; note = Nucleotide with phosphorothioate linkage
  modified_base 11: mod_base = OTHER; note = Nucleotide with phosphorothioate linkage
  modified_base 12: mod_base = OTHER; note = Thymine with phosphorothioate linkage
  modified_base 13: mod_base = OTHER; note = Nucleotide with phosphorothioate linkage
  modified_base 14: mod_base = OTHER; note = Nucleotide with phosphorothioate linkage
  modified_base 15: mod_base = OTHER; note = Nucleotide with phosphorothioate linkage
  modified_base 16: mod_base = OTHER; note = 2'-O-methoxyethyl modified nucleotide with phosphorothioate linkage
  modified_base 17: mod_base = OTHER; note = 2'-O-methoxyethyl 5-methylcytosine with phosphorothioate linkage
  modified_base 18: mod_base = OTHER; note = 2'-O-methoxyethyl modified nucleotide with phosphorothioate linkage
  modified_base 19: mod_base = OTHER; note = 2'-O-methoxyethyl modified nucleotide with phosphorothioate linkage
  modified_base 20: mod_base = OTHER; note = 2'-O-methoxyethyl modified nucleotide
  misc_feature 1..5: note = RNA
  misc_feature 6: note = DNA
  misc_feature 7: note = RNA
  misc_feature 8..15: note = DNA
  misc_feature 16..20: note = RNA
acgtgcagaggtgaagcgaa

SEQ ID NO: 315 - DNA, 20 bp, synthetic construct
  source 1..20: mol_type = other DNA
  modified_base 1: mod_base = OTHER; note = 2'-O-methoxyethyl modified nucleotide with phosphorothioate linkage
  modified_base 2: mod_base = OTHER; note = 2'-O-methoxyethyl 5-methylcytosine with phosphorothioate linkage
  modified_base 3: mod_base = OTHER; note = 2'-O-methoxyethyl modified nucleotide with phosphorothioate linkage
  modified_base 4: mod_base = OTHER; note = 2'-O-methoxyethyl modified thymine with phosphorothioate linkage
  modified_base 5: mod_base = OTHER; note = 2'-O-methoxyethyl modified nucleotide with phosphorothioate linkage
  modified_base 6: mod_base = OTHER; note = 5-methylcytosine with phosphorothioate linkage
  modified_base 7: mod_base = OTHER; note = Nucleotide with phosphorothioate linkage
  modified_base 8: mod_base = OTHER; note = 2'-O-methylcyclopropyl modified nucleotide with phosphorothioate linkage
  modified_base 9: mod_base = OTHER; note = Nucleotide with phosphorothioate linkage
  modified_base 10: mod_base = OTHER; note = Nucleotide with phosphorothioate linkage
  modified_base 11: mod_base = OTHER; note = Nucleotide with phosphorothioate linkage
  modified_base 12: mod_base = OTHER; note = Thymine with phosphorothioate linkage
  modified_base 13: mod_base = OTHER; note = Nucleotide with phosphorothioate linkage
  modified_base 14: mod_base = OTHER; note = Nucleotide with phosphorothioate linkage
  modified_base 15: mod_base = OTHER; note = Nucleotide with phosphorothioate linkage
  modified_base 16: mod_base = OTHER; note = 2'-O-methoxyethyl modified nucleotide with phosphorothioate linkage
  modified_base 17: mod_base = OTHER; note = 2'-O-methoxyethyl 5-methylcytosine with phosphorothioate linkage
  modified_base 18: mod_base = OTHER; note = 2'-O-methoxyethyl modified nucleotide with phosphorothioate linkage
  modified_base 19: mod_base = OTHER; note = 2'-O-methoxyethyl modified nucleotide with phosphorothioate linkage
  modified_base 20: mod_base = OTHER; note = 2'-O-methoxyethyl modified nucleotide
  misc_feature 1..5: note = RNA
  misc_feature 6..7: note = DNA
  misc_feature 8: note = RNA
  misc_feature 9..15: note = DNA
  misc_feature 16..20: note = RNA
acgtgcagaggtgaagcgaa

SEQ ID NO: 316 - DNA, 20 bp, synthetic construct
  source 1..20: mol_type = other DNA
  modified_base 1: mod_base = OTHER; note = 2'-O-methoxyethyl modified nucleotide with phosphorothioate linkage
  modified_base 2: mod_base = OTHER; note = 2'-O-methoxyethyl 5-methylcytosine with phosphorothioate linkage
  modified_base 3: mod_base = OTHER; note = 2'-O-methoxyethyl modified nucleotide with phosphorothioate linkage
  modified_base 4: mod_base = OTHER; note = 2'-O-methoxyethyl modified thymine with phosphorothioate linkage
  modified_base 5: mod_base = OTHER; note = 2'-O-methoxyethyl modified nucleotide with phosphorothioate linkage
  modified_base 6: mod_base = OTHER; note = 2'-O-methyl-3'-xylo modified nucleotide with phosphorothioate linkage
  modified_base 7: mod_base = OTHER; note = Nucleotide with phosphorothioate linkage
  modified_base 8: mod_base = OTHER; note = Nucleotide with phosphorothioate linkage
  modified_base 9: mod_base = OTHER; note = Nucleotide with phosphorothioate linkage
  modified_base 10: mod_base = OTHER; note = Nucleotide with phosphorothioate linkage
  modified_base 11: mod_base = OTHER; note = Nucleotide with phosphorothioate linkage
  modified_base 12: mod_base = OTHER; note = Thymine with phosphorothioate linkage
  modified_base 13: mod_base = OTHER; note = Nucleotide with phosphorothioate linkage
  modified_base 14: mod_base = OTHER; note = Nucleotide with phosphorothioate linkage
  modified_base 15: mod_base = OTHER; note = Nucleotide with phosphorothioate linkage
  modified_base 16: mod_base = OTHER; note = 2'-O-methoxyethyl modified nucleotide with phosphorothioate linkage
  modified_base 17: mod_base = OTHER; note = 2'-O-methoxyethyl 5-methylcytosine with phosphorothioate linkage
  modified_base 18: mod_base = OTHER; note = 2'-O-methoxyethyl modified nucleotide with phosphorothioate linkage
  modified_base 19: mod_base = OTHER; note = 2'-O-methoxyethyl modified nucleotide with phosphorothioate linkage
  modified_base 20: mod_base = OTHER; note = 2'-O-methoxyethyl modified nucleotide
  misc_feature 1..6: note = RNA
  misc_feature 7..15: note = DNA
  misc_feature 16..20: note = RNA
acgtgcagaggtgaagcgaa

SEQ ID NO: 317 - DNA, 20 bp, synthetic construct
  source 1..20: mol_type = other DNA
  modified_base 1: mod_base = OTHER; note = 2'-O-methoxyethyl modified nucleotide with phosphorothioate linkage
  modified_base 2: mod_base = OTHER; note = 2'-O-methoxyethyl 5-methylcytosine with phosphorothioate linkage
  modified_base 3: mod_base = OTHER; note = 2'-O-methoxyethyl modified nucleotide with phosphorothioate linkage
  modified_base 4: mod_base = OTHER; note = 2'-O-methoxyethyl modified thymine with phosphorothioate linkage
  modified_base 5: mod_base = OTHER; note = 2'-O-methoxyethyl modified nucleotide with phosphorothioate linkage
  modified_base 6: mod_base = OTHER; note = 5-methylcytosine with phosphorothioate linkage
  modified_base 7: mod_base = OTHER; note = 2'-O-methyl-3'-xylo modified nucleotide with phosphorothioate linkage
  modified_base 8: mod_base = OTHER; note = Nucleotide with phosphorothioate linkage
  modified_base 9: mod_base = OTHER; note = Nucleotide with phosphorothioate linkage
  modified_base 10: mod_base = OTHER; note = Nucleotide with phosphorothioate linkage
  modified_base 11: mod_base = OTHER; note = Nucleotide with phosphorothioate linkage
  modified_base 12: mod_base = OTHER; note = Thymine with phosphorothioate linkage
  modified_base 13: mod_base = OTHER; note = Nucleotide with phosphorothioate linkage
  modified_base 14: mod_base = OTHER; note = Nucleotide with phosphorothioate linkage
  modified_base 15: mod_base = OTHER; note = Nucleotide with phosphorothioate linkage
  modified_base 16: mod_base = OTHER; note = 2'-O-methoxyethyl modified nucleotide with phosphorothioate linkage
  modified_base 17: mod_base = OTHER; note = 2'-O-methoxyethyl 5-methylcytosine with phosphorothioate linkage
  modified_base 18: mod_base = OTHER; note = 2'-O-methoxyethyl modified nucleotide with phosphorothioate linkage
  modified_base 19: mod_base = OTHER; note = 2'-O-methoxyethyl modified nucleotide with phosphorothioate linkage
  modified_base 20: mod_base = OTHER; note = 2'-O-methoxyethyl modified nucleotide
  misc_feature 1..5: note = RNA
  misc_feature 6: note = DNA
  misc_feature 7: note = RNA
  misc_feature 8..15: note = DNA
  misc_feature 16..20: note = RNA
acgtgcagaggtgaagcgaa

SEQ ID NO: 318 - DNA, 20 bp, synthetic construct
  source 1..20: mol_type = other DNA
  modified_base 1: mod_base = OTHER; note = 2'-O-methoxyethyl modified nucleotide with phosphorothioate linkage
  modified_base 2: mod_base = OTHER; note = 2'-O-methoxyethyl 5-methylcytosine with phosphorothioate linkage
  modified_base 3: mod_base = OTHER; note = 2'-O-methoxyethyl modified nucleotide with phosphorothioate linkage
  modified_base 4: mod_base = OTHER; note = 2'-O-methoxyethyl modified thymine with phosphorothioate linkage
  modified_base 5: mod_base = OTHER; note = 2'-O-methoxyethyl modified nucleotide with phosphorothioate linkage
  modified_base 6: mod_base = OTHER; note = 5-methylcytosine with phosphorothioate linkage
  modified_base 7: mod_base = OTHER; note = Nucleotide with phosphorothioate linkage
  modified_base 8: mod_base = OTHER; note = 2'-O-methyl-3'-xylo modified nucleotide with phosphorothioate linkage
  modified_base 9: mod_base = OTHER; note = Nucleotide with phosphorothioate linkage
  modified_base 10: mod_base = OTHER; note = Nucleotide with phosphorothioate linkage
  modified_base 11: mod_base = OTHER; note = Nucleotide with phosphorothioate linkage
  modified_base 12: mod_base = OTHER; note = Thymine with phosphorothioate linkage
  modified_base 13: mod_base = OTHER; note = Nucleotide with phosphorothioate linkage
  modified_base 14: mod_base = OTHER; note = Nucleotide with phosphorothioate linkage
  modified_base 15: mod_base = OTHER; note = Nucleotide with phosphorothioate linkage
  modified_base 16: mod_base = OTHER; note = 2'-O-methoxyethyl modified nucleotide with phosphorothioate linkage
  modified_base 17: mod_base = OTHER; note = 2'-O-methoxyethyl 5-methylcytosine with phosphorothioate linkage
  modified_base 18: mod_base = OTHER; note = 2'-O-methoxyethyl modified nucleotide with phosphorothioate linkage
  modified_base 19: mod_base = OTHER; note = 2'-O-methoxyethyl modified nucleotide with phosphorothioate linkage
  modified_base 20: mod_base = OTHER; note = 2'-O-methoxyethyl modified nucleotide
  misc_feature 1..5: note = RNA
  misc_feature 6..7: note = DNA
  misc_feature 8: note = RNA
  misc_feature 9..15: note = DNA
  misc_feature 16..20: note = RNA
acgtgcagaggtgaagcgaa

SEQ ID NO: 319 - DNA, 20 bp, synthetic construct
  source 1..20: mol_type = other DNA
  modified_base 1: mod_base = OTHER; note = 2'-O-methoxyethyl modified nucleotide with phosphorothioate linkage
  modified_base 2: mod_base = OTHER; note = 2'-O-methoxyethyl modified nucleotide with phosphorothioate linkage
  modified_base 3: mod_base = OTHER; note = 2'-O-methoxyethyl modified nucleotide with phosphorothioate linkage
  modified_base 4: mod_base = OTHER; note = 2'-O-methoxyethyl modified nucleotide with phosphorothioate linkage
  modified_base 5: mod_base = OTHER; note = 2'-O-methoxyethyl modified thymine with phosphorothioate linkage
  modified_base 6: mod_base = OTHER; note = Nucleotide with phosphorothioate linkage
  modified_base 7: mod_base = OTHER; note = Nucleotide with phosphorothioate linkage
  modified_base 8: mod_base = OTHER; note = Nucleotide with phosphorothioate linkage
  modified_base 9: mod_base = OTHER; note = Nucleotide with phosphorothioate linkage
  modified_base 10: mod_base = OTHER; note = 5-methylcytosine with phosphorothioate linkage
  modified_base 11: mod_base = OTHER; note = Nucleotide with phosphorothioate linkage
  modified_base 12: mod_base = OTHER; note = Nucleotide with phosphorothioate linkage
  modified_base 13: mod_base = OTHER; note = Nucleotide with phosphorothioate linkage
  modified_base 14: mod_base = OTHER; note = Nucleotide with phosphorothioate linkage
  modified_base 15: mod_base = OTHER; note = Thymine with phosphorothioate linkage
  modified_base 16: mod_base = OTHER; note = 2'-O-methoxyethyl modified nucleotide with phosphorothioate linkage
  modified_base 17: mod_base = OTHER; note = 2'-O-methoxyethyl 5-methylcytosine with phosphorothioate linkage
  modified_base 18: mod_base = OTHER; note = 2'-O-methoxyethyl modified nucleotide with phosphorothioate linkage
  modified_base 19: mod_base = OTHER; note = 2'-O-methoxyethyl 5-methylcytosine with phosphorothioate linkage
  modified_base 20: mod_base = OTHER; note = 2'-O-methoxyethyl modified nucleotide
  misc_feature 1..5: note = RNA
  misc_feature 6..15: note = DNA
  misc_feature 16..20: note = RNA
gaggtgaagcgaagtgcaca

SEQ ID NO: 320 - DNA, 20 bp, synthetic construct
  source 1..20: mol_type = other DNA
  modified_base 1: mod_base = OTHER; note = 2'-O-methoxyethyl modified nucleotide with phosphorothioate linkage
  modified_base 2: mod_base = OTHER; note = 2'-O-methoxyethyl modified thymine with phosphorothioate linkage
  modified_base 3: mod_base = OTHER; note = 2'-O-methoxyethyl modified nucleotide with phosphorothioate linkage
  modified_base 4: mod_base = OTHER; note = 2'-O-methoxyethyl 5-methylcytosine with phosphorothioate linkage
  modified_base 5: mod_base = OTHER; note = 2'-O-methoxyethyl modified nucleotide with phosphorothioate linkage
  modified_base 6: mod_base = OTHER; note = Nucleotide with phosphorothioate linkage
  modified_base 7: mod_base = OTHER; note = Nucleotide with phosphorothioate linkage
  modified_base 8: mod_base = OTHER; note = Nucleotide with phosphorothioate linkage
  modified_base 9: mod_base = OTHER; note = Nucleotide with phosphorothioate linkage
  modified_base 10: mod_base = OTHER; note = Thymine with phosphorothioate linkage
  modified_base 11: mod_base = OTHER; note = Nucleotide with phosphorothioate linkage
  modified_base 12: mod_base = OTHER; note = Nucleotide with phosphorothioate linkage
  modified_base 13: mod_base = OTHER; note = Nucleotide with phosphorothioate linkage
  modified_base 14: mod_base = OTHER; note = Nucleotide with phosphorothioate linkage
  modified_base 15: mod_base = OTHER; note = 5-methylcytosine with phosphorothioate linkage
  modified_base 16: mod_base = OTHER; note = 2'-O-methoxyethyl modified nucleotide with phosphorothioate linkage
  modified_base 17: mod_base = OTHER; note = 2'-O-methoxyethyl modified nucleotide with phosphorothioate linkage
  modified_base 18: mod_base = OTHER; note = 2'-O-methoxyethyl modified nucleotide with phosphorothioate linkage
  modified_base 19: mod_base = OTHER; note = 2'-O-methoxyethyl modified nucleotide with phosphorothioate linkage
  modified_base 20: mod_base = OTHER; note = 2'-O-methoxyethyl thymine
  misc_feature 1..5: note = RNA
  misc_feature 6..15: note = DNA
  misc_feature 16..20: note = RNA
gtgcagaggtgaagcgaagt

SEQ ID NO: 321 - DNA, 20 bp, synthetic construct
  source 1..20: mol_type = other DNA
gcagaggtgaagcgaagtgc

SEQ ID NO: 322 - DNA, 20 bp, synthetic construct
  source 1..20: mol_type = other DNA
gtgaagcgaagtgcacacgg

SEQ ID NO: 323 - DNA, 20 bp, synthetic construct
  source 1..20: mol_type = other DNA
ggtgaagcgaagtgcacacg

SEQ ID NO: 324 - DNA, 20 bp, synthetic construct
  source 1..20: mol_type = other DNA
aggtgaagcgaagtgcacac

SEQ ID NO: 325 - DNA, 20 bp, synthetic construct
  source 1..20: mol_type = other DNA
gaggtgaagcgaagtgcaca

SEQ ID NO: 326 - DNA, 20 bp, synthetic construct
  source 1..20: mol_type = other DNA
agaggtgaagcgaagtgcac

SEQ ID NO: 327 - DNA, 20 bp, synthetic construct
  source 1..20: mol_type = other DNA
cagaggtgaagcgaagtgca

SEQ ID NO: 328 - DNA, 20 bp, synthetic construct
  source 1..20: mol_type = other DNA
tgcagaggtgaagcgaagtg

SEQ ID NO: 329 - DNA, 20 bp, synthetic construct
  source 1..20: mol_type = other DNA
gtgcagaggtgaagcgaagt

SEQ ID NO: 330 - DNA, 20 bp, synthetic construct
  source 1..20: mol_type = other DNA
cgtgcagaggtgaagcgaag

SEQ ID NO: 331 - DNA, 20 bp, synthetic construct
  source 1..20: mol_type = other DNA
acgtgcagaggtgaagcgaa

SEQ ID NO: 332 - DNA, 23 bp, synthetic construct
  source 1..23: mol_type = other DNA
ttggcagaggtgaagcgaagtgc

SEQ ID NO: 333 - DNA, 23 bp, synthetic construct
  source 1..23: mol_type = other DNA
tgtgcagaggtgaagcgaagtgc

SEQ ID NO: 334 - DNA, 21 bp, synthetic construct
  source 1..21: mol_type = other DNA
tgcagaggtgaagcgaagtgc

SEQ ID NO: 335 - DNA, 22 bp, synthetic construct
  source 1..22: mol_type = other DNA
ttgcagaggtgaagcgaagtgc

SEQ ID NO: 336 - DNA, 23 bp, synthetic construct
  source 1..23: mol_type = other DNA
tttgcagaggtgaagcgaagtgc

SEQ ID NO: 337 - DNA, 22 bp, synthetic construct
  source 1..22: mol_type = other DNA
tggcagaggtgaagcgaagtgc

SEQ ID NO: 338 - DNA, 24 bp, synthetic construct
  source 1..24: mol_type = other DNA
ttgtgcagaggtgaagcgaagtgc

SEQ ID NO: 339 - DNA, 26 bp, synthetic construct
  source 1..26: mol_type = other DNA
tgttgtgcagaggtgaagcgaagtgc

SEQ ID NO: 340 - DNA, 24 bp, synthetic construct
  source 1..24: mol_type = other DNA
ttatgcagaggtgaagcgaagtgc

SEQ ID NO: 341 - DNA, 26 bp, synthetic construct
  source 1..26: mol_type = other DNA
tattatgcagaggtgaagcgaagtgc

SEQ ID NO: 342 - DNA, 21 bp, synthetic construct
  source 1..21: mol_type = other DNA
gcagaggtgaagcgaagtgct

SEQ ID NO: 343 - DNA, 22 bp, synthetic construct
  source 1..22: mol_type = other DNA
gcagaggtgaagcgaagtgctt

SEQ ID NO: 344 - DNA, 23 bp, synthetic construct
  source 1..23: mol_type = other DNA
gcagaggtgaagcgaagtgcttt

SEQ ID NO: 345 - DNA, 22 bp, synthetic construct
  source 1..22: mol_type = other DNA
gcagaggtgaagcgaagtgctg

SEQ ID NO: 346 - DNA, 23 bp, synthetic construct
  source 1..23: mol_type = other DNA
gcagaggtgaagcgaagtgcttg

SEQ ID NO: 347 - DNA, 23 bp, synthetic construct
  source 1..23: mol_type = other DNA
gcagaggtgaagcgaagtgctgt

SEQ ID NO: 348 - DNA, 20 bp, synthetic construct
  source 1..20: mol_type = other DNA
  modified_base 3: mod_base = OTHER; note = 2,6-diaminopurine
gcngaggtgaagcgaagtgc

SEQ ID NO: 349 - DNA, 20 bp, synthetic construct
  source 1..20: mol_type = other DNA
  modified_base 5: mod_base = OTHER; note = 2,6-diaminopurine
gcagnggtgaagcgaagtgc

SEQ ID NO: 350 - DNA, 20 bp, synthetic construct
  source 1..20: mol_type = other DNA
  modified_base 16: mod_base = OTHER; note = 2,6-diaminopurine
gcagaggtgaagcgangtgc

SEQ ID NO: 351 - DNA, 19 bp, synthetic construct
  source 1..19: mol_type = other DNA
cagaggtgaagcgaagtgc

SEQ ID NO: 352 - DNA, 19 bp, synthetic construct
  source 1..19: mol_type = other DNA
gcagaggtgaagcgaagtg

SEQ ID NO: 353 - DNA, 20 bp, synthetic construct
  source 1..20: mol_type = other DNA
  modified_base 1: mod_base = OTHER; note = 2'-O-methyl modified nucleotide with phosphorothioate linkage
  modified_base 2: mod_base = OTHER; note = 2'-O-methyl modified nucleotide with phosphorothioate linkage
  modified_base 3: mod_base = OTHER; note = 2'-O-methyl modified nucleotide with phosphorothioate linkage
  modified_base 4: mod_base = OTHER; note = 2'-O-methyl modified nucleotide with phosphorothioate linkage
  modified_base 5: mod_base = OTHER; note = 2'-O-methyl modified nucleotide with phosphorothioate linkage
  modified_base 15: mod_base = OTHER; note = Nucleotide with phosphorothioate linkage
  modified_base 16: mod_base = OTHER; note = Nucleotide with phosphorothioate linkage
  modified_base 17: mod_base = OTHER; note = 2'-O-methyl modified nucleotide with phosphorothioate linkage
  modified_base 18: mod_base = OTHER; note = Nucleotide with phosphorothioate linkage
  modified_base 19: mod_base = OTHER; note = 2'-O-methyl modified nucleotide with phosphorothioate linkage
  modified_base 20: mod_base = OTHER; note = 2'-O-methyl modified nucleotide
  misc_feature 1..8: note = RNA
  misc_feature 9: note = DNA
  misc_feature 10..11: note = RNA
  misc_feature 12: note = DNA
  misc_feature 13..20: note = RNA
gcacttcgcttcacctctgc

SEQ ID NO: 354 - RNA, 20 nt, synthetic construct
  source 1..20: mol_type = other RNA
  modified_base 1: mod_base = OTHER; note = 2'-O-methyl modified nucleotide with phosphorothioate linkage
  modified_base 2: mod_base = OTHER; note = 2'-O-methyl modified nucleotide with phosphorothioate linkage
  modified_base 3: mod_base = OTHER; note = 2'-O-methyl modified nucleotide with phosphorothioate linkage
  modified_base 4: mod_base = OTHER; note = 2'-O-methyl modified nucleotide with phosphorothioate linkage
  modified_base 5: mod_base = OTHER; note = 2'-O-methyl modified nucleotide with phosphorothioate linkage
  modified_base 15: mod_base = OTHER; note = Nucleotide with phosphorothioate linkage
  modified_base 16: mod_base = OTHER; note = 2'-O-methyl modified nucleotide with phosphorothioate linkage
  modified_base 17: mod_base = OTHER; note = 2'-O-methyl modified nucleotide with phosphorothioate linkage
  modified_base 18: mod_base = OTHER; note = 2'-O-methyl modified nucleotide with phosphorothioate linkage
  modified_base 19: mod_base = OTHER; note = 2'-O-methyl modified nucleotide with phosphorothioate linkage
  modified_base 20: mod_base = OTHER; note = 2'-O-methyl modified nucleotide
gcactttgttttatttctgc

SEQ ID NO: 355 - RNA, 20 nt, synthetic construct
  source 1..20: mol_type = other RNA
  modified_base 1: mod_base = OTHER; note = 2'-O-methyl modified nucleotide with phosphorothioate linkage
  modified_base 2: mod_base = OTHER; note = 2'-O-methyl modified nucleotide with phosphorothioate linkage
  modified_base 3: mod_base = OTHER; note = 2'-O-methyl modified nucleotide with phosphorothioate linkage
  modified_base 4: mod_base = OTHER; note = 2'-O-methyl modified nucleotide with phosphorothioate linkage
  modified_base 5: mod_base = OTHER; note = 2'-O-methyl modified nucleotide with phosphorothioate linkage
  modified_base 15: mod_base = OTHER; note = Nucleotide with phosphorothioate linkage
  modified_base 16: mod_base = OTHER; note = 2'-O-methyl modified nucleotide with phosphorothioate linkage
  modified_base 17: mod_base = OTHER; note = 2'-O-methyl modified nucleotide with phosphorothioate linkage
  modified_base 18: mod_base = OTHER; note = 2'-O-methyl modified nucleotide with phosphorothioate linkage
  modified_base 19: mod_base = OTHER; note = 2'-O-methyl modified nucleotide with phosphorothioate linkage
  modified_base 20: mod_base = OTHER; note = 2'-O-methyl modified nucleotide
gtattttgttttatttttgt

SEQ ID NO: 356 - RNA, 20 nt, synthetic construct
  source 1..20: mol_type = other RNA
  modified_base 1: mod_base = OTHER; note = 2'-O-methyl modified nucleotide with phosphorothioate linkage
  modified_base 2: mod_base = OTHER; note = 2'-O-methyl modified nucleotide with phosphorothioate linkage
  modified_base 3: mod_base = OTHER; note = 2'-O-methyl modified nucleotide with phosphorothioate linkage
  modified_base 4: mod_base = OTHER; note = Nucleotide with phosphorothioate linkage
  modified_base 16: mod_base = OTHER; note = Nucleotide with phosphorothioate linkage
  modified_base 17: mod_base = OTHER; note = Nucleotide with phosphorothioate linkage
  modified_base 18: mod_base = OTHER; note = 2'-O-methyl modified nucleotide with phosphorothioate linkage
  modified_base 19: mod_base = OTHER; note = 2'-O-methyl modified nucleotide with phosphorothioate linkage
  modified_base 20: mod_base = OTHER; note = 2'-O-methyl modified nucleotide
gtattttgttttatttttgt

SEQ ID NO: 357 - DNA, 20 bp, synthetic construct
  source 1..20: mol_type = other DNA
  modified_base 1: mod_base = OTHER; note = 2'-O-methyl modified nucleotide with phosphorothioate linkage
  modified_base 2: mod_base = OTHER; note = 2'-O-methyl modified nucleotide with phosphorothioate linkage
  modified_base 3: mod_base = OTHER; note = 2'-O-methyl modified nucleotide with phosphorothioate linkage
  modified_base 4: mod_base = OTHER; note = 2'-O-methyl modified nucleotide with phosphorothioate linkage
  modified_base 5: mod_base = OTHER; note = Nucleotide with phosphorothioate linkage
  modified_base 15: mod_base = OTHER; note = Nucleotide with phosphorothioate linkage
  modified_base 16: mod_base = OTHER; note = Nucleotide with phosphorothioate linkage
  modified_base 17: mod_base = OTHER; note = 2'-O-methyl modified nucleotide with phosphorothioate linkage
  modified_base 18: mod_base = OTHER; note = Nucleotide with phosphorothioate linkage
  modified_base 19: mod_base = OTHER; note = 2'-O-methyl modified nucleotide with phosphorothioate linkage
  modified_base 20: mod_base = OTHER; note = 2'-O-methyl modified nucleotide
  misc_feature 1..6: note = RNA
  misc_feature 7: note = DNA
  misc_feature 8: note = RNA
  misc_feature 9: note = DNA
  misc_feature 10..11: note = RNA
  misc_feature 12: note = DNA
  misc_feature 13: note = RNA
  misc_feature 14: note = DNA
  misc_feature 15..20: note = RNA
gcacttcgcttcacctctgc

SEQ ID NO: 358 - DNA, 20 bp, synthetic construct
  source 1..20: mol_type = other DNA
  modified_base 1: mod_base = OTHER; note = 2'-O-methyl modified nucleotide with phosphorothioate linkage
  modified_base 2: mod_base = OTHER; note = 2'-O-methyl modified nucleotide with phosphorothioate linkage
  modified_base 3: mod_base = OTHER; note = 2'-O-methyl modified nucleotide with phosphorothioate linkage
  modified_base 4: mod_base = OTHER; note = 2'-O-methyl modified nucleotide with phosphorothioate linkage
  modified_base 5: mod_base = OTHER; note = Nucleotide with phosphorothioate linkage
  modified_base 15: mod_base = OTHER; note = Nucleotide with phosphorothioate linkage
  modified_base 16: mod_base = OTHER; note = Nucleotide with phosphorothioate linkage
  modified_base 17: mod_base = OTHER; note = 2'-O-methyl modified nucleotide with phosphorothioate linkage
  modified_base 18: mod_base = OTHER; note = Nucleotide with phosphorothioate linkage
  modified_base 19: mod_base = OTHER; note = 2'-O-methyl modified nucleotide with phosphorothioate linkage
  modified_base 20: mod_base = OTHER; note = 2'-O-methyl modified nucleotide
  misc_feature 1..6: note = RNA
  misc_feature 7: note = DNA
  misc_feature 8: note = RNA
  misc_feature 9: note = DNA
  misc_feature 10..11: note = RNA
  misc_feature 12: note = DNA
  misc_feature 13: note = RNA
  misc_feature 14..15: note = DNA
  misc_feature 16..20: note = RNA
gcacttcgcttcacctctgc

SEQ ID NO: 359 - DNA, 20 bp, synthetic construct
  source 1..20: mol_type = other DNA
  modified_base 1: mod_base = OTHER; note = 2'-O-methyl modified nucleotide with phosphorothioate linkage
  modified_base 2: mod_base = OTHER; note = 2'-O-methyl modified nucleotide with phosphorothioate linkage
  modified_base 3: mod_base = OTHER; note = 2'-O-methyl modified nucleotide with phosphorothioate linkage
  modified_base 4: mod_base = OTHER; note = 2'-O-methyl modified nucleotide
  modified_base 17: mod_base = OTHER; note = 2'-O-methyl modified nucleotide with phosphorothioate linkage
  modified_base 18: mod_base = OTHER; note = Nucleotide with phosphorothioate linkage
  modified_base 19: mod_base = OTHER; note = 2'-O-methyl modified nucleotide with phosphorothioate linkage
  modified_base 20: mod_base = OTHER; note = 2'-O-methyl modified nucleotide
  misc_feature 1..6: note = RNA
  misc_feature 7: note = DNA
  misc_feature 8: note = RNA
  misc_feature 9: note = DNA
  misc_feature 10..11: note = RNA
  misc_feature 12: note = DNA
  misc_feature 13: note = RNA
  misc_feature 14..15: note = DNA
  misc_feature 16..20: note = RNA
gcacttcgcttcacctctgc

SEQ ID NO: 360 - DNA, 20 bp, synthetic construct
  source 1..20: mol_type = other DNA
  modified_base 1: mod_base = OTHER; note = 2'-O-methyl modified nucleotide with phosphorothioate linkage
  modified_base 2: mod_base = OTHER; note = 2'-O-methyl modified nucleotide with phosphorothioate linkage
  modified_base 3: mod_base = OTHER; note = 2'-O-methyl modified nucleotide with phosphorothioate linkage
  modified_base 4: mod_base = OTHER; note = 2'-O-methyl modified nucleotide
  modified_base 17: mod_base = OTHER; note = 2'-O-methyl modified nucleotide
  modified_base 19: mod_base = OTHER; note = 2'-O-methyl modified nucleotide with phosphorothioate linkage
  modified_base 20: mod_base = OTHER; note = 2'-O-methyl modified nucleotide
  misc_feature 1..6: note = RNA
  misc_feature 7: note = DNA
  misc_feature 8: note = RNA
  misc_feature 9: note = DNA
  misc_feature 10..11: note = RNA
  misc_feature 12: note = DNA
  misc_feature 13: note = RNA
  misc_feature 14..15: note = DNA
  misc_feature 16..20: note = RNA
gcacttcgcttcacctctgc

SEQ ID NO: 361-363 - skipped (3 entries)

SEQ ID NO: 364 - RNA, 20 nt, synthetic construct
  source 1..20: mol_type = other RNA
  modified_base 1: mod_base = OTHER; note = 2'-O-methyl modified nucleotide with phosphorothioate linkage
  modified_base 2: mod_base = OTHER; note = 2'-O-methyl modified nucleotide with phosphorothioate linkage
  modified_base 3: mod_base = OTHER; note = 2'-O-methyl modified nucleotide with phosphorothioate linkage
  modified_base 4: mod_base = OTHER; note = 2'-O-methyl modified nucleotide with phosphorothioate linkage
  modified_base 5: mod_base = OTHER; note = 2'-O-methyl modified nucleotide with phosphorothioate linkage
  modified_base 15: mod_base = OTHER; note = Nucleotide with phosphorothioate linkage
  modified_base 16: mod_base = OTHER; note = Nucleotide with phosphorothioate linkage
  modified_base 17: mod_base = OTHER; note = 2'-O-methyl modified nucleotide with phosphorothioate linkage
  modified_base 18: mod_base = OTHER; note = Nucleotide with phosphorothioate linkage
  modified_base 19: mod_base = OTHER; note = 2'-O-methyl modified nucleotide with phosphorothioate linkage
  modified_base 20: mod_base = OTHER; note = 2'-O-methyl modified nucleotide
gcacttcgcttcacctctgc

SEQ ID NO: 365 - RNA, 20 nt, synthetic construct
  source 1..20: mol_type = other RNA
  modified_base 1: mod_base = OTHER; note = 2'-O-methyl modified nucleotide with phosphorothioate linkage
  modified_base 2: mod_base = OTHER; note = 2'-O-methyl modified nucleotide with phosphorothioate linkage
  modified_base 3: mod_base = OTHER; note = 2'-O-methyl modified nucleotide with phosphorothioate linkage
  modified_base 4: mod_base = OTHER; note = 2'-O-methyl modified nucleotide with phosphorothioate linkage
  modified_base 5: mod_base = OTHER; note = Nucleotide with phosphorothioate linkage
  modified_base 15: mod_base = OTHER; note = Nucleotide with phosphorothioate linkage
  modified_base 16: mod_base = OTHER; note = Nucleotide with phosphorothioate linkage
  modified_base 17: mod_base = OTHER; note = 2'-O-methyl modified nucleotide with phosphorothioate linkage
  modified_base 18: mod_base = OTHER; note = Nucleotide with phosphorothioate linkage
  modified_base 19: mod_base = OTHER; note = 2'-O-methyl modified nucleotide with phosphorothioate linkage
  modified_base 20: mod_base = OTHER; note = 2'-O-methyl modified nucleotide
gcacttcgcttcacctctgc

SEQ ID NO: 366 - RNA, 20 nt, synthetic construct
  source 1..20: mol_type = other RNA
  modified_base 1: mod_base = OTHER; note = 2'-O-methyl modified nucleotide with phosphorothioate linkage
  modified_base 2: mod_base = OTHER; note = 2'-O-methyl modified nucleotide with phosphorothioate linkage
  modified_base 3: mod_base = OTHER; note = 2'-O-methyl modified nucleotide with phosphorothioate linkage
  modified_base 4: mod_base = OTHER; note = 2'-O-methyl modified nucleotide
  modified_base 15: mod_base = OTHER; note = Nucleotide with phosphorothioate linkage
  modified_base 16: mod_base = OTHER; note = Nucleotide with phosphorothioate linkage
  modified_base 17: mod_base = OTHER; note = 2'-O-methyl modified nucleotide with phosphorothioate linkage
  modified_base 18: mod_base = OTHER; note = Nucleotide with phosphorothioate linkage
  modified_base 19: mod_base = OTHER; note = 2'-O-methyl modified nucleotide with phosphorothioate linkage
  modified_base 20: mod_base = OTHER; note = 2'-O-methyl modified nucleotide
gcacttcgcttcacctctgc

SEQ ID NO: 367 - RNA, 20 nt, synthetic construct
  source 1..20: mol_type = other RNA
  modified_base 1: mod_base = OTHER; note = 2'-O-methyl modified nucleotide with phosphorothioate linkage
  modified_base 2: mod_base = OTHER; note = 2'-O-methyl modified nucleotide with phosphorothioate linkage
  modified_base 3: mod_base = OTHER; note = 2'-O-methyl modified nucleotide with phosphorothioate linkage
  modified_base 4: mod_base = OTHER; note = 2'-O-methyl modified nucleotide
  modified_base 17: mod_base = OTHER; note = 2'-O-methyl modified nucleotide with phosphorothioate linkage
  modified_base 18: mod_base = OTHER; note = Nucleotide with phosphorothioate linkage
  modified_base 19: mod_base = OTHER; note = 2'-O-methyl modified nucleotide with phosphorothioate linkage
  modified_base 20: mod_base = OTHER; note = 2'-O-methyl modified nucleotide
gcacttcgcttcacctctgc

SEQ ID NO: 368 - RNA, 20 nt, synthetic construct
  source 1..20: mol_type = other RNA
  modified_base 1: mod_base = OTHER; note = 2'-O-methyl modified nucleotide with phosphorothioate linkage
  modified_base 2: mod_base = OTHER; note = 2'-O-methyl modified nucleotide with phosphorothioate linkage
  modified_base 3: mod_base = OTHER; note = 2'-O-methyl modified nucleotide with phosphorothioate linkage
  modified_base 4: mod_base = OTHER; note = 2'-O-methyl modified nucleotide
  modified_base 17: mod_base = OTHER; note = 2'-O-methyl modified nucleotide
  modified_base 19: mod_base = OTHER; note = 2'-O-methyl modified nucleotide with phosphorothioate linkage
  modified_base 20: mod_base = OTHER; note = 2'-O-methyl modified nucleotide
gcacttcgcttcacctctgc

SEQ ID NO: 369 - RNA, 20 nt, synthetic construct
  source 1..20: mol_type = other RNA
  modified_base 1: mod_base = OTHER; note = 2'-O-methyl modified nucleotide with phosphorothioate linkage
  modified_base 2: mod_base = OTHER; note = 2'-O-methyl modified nucleotide with phosphorothioate linkage
  modified_base 3: mod_base = OTHER; note = 2'-O-methyl modified nucleotide with phosphorothioate linkage
  modified_base 4: mod_base = OTHER; note = 2'-O-methyl modified nucleotide with phosphorothioate linkage
  modified_base 5: mod_base = OTHER; note = 2'-O-methyl modified nucleotide with phosphorothioate linkage
  modified_base 15: mod_base = OTHER; note = Nucleotide with phosphorothioate linkage
  modified_base 16: mod_base = OTHER; note = 2'-O-methyl modified nucleotide with phosphorothioate linkage
  modified_base 17: mod_base = OTHER; note = 2'-O-methyl modified nucleotide with phosphorothioate linkage
  modified_base 18: mod_base = OTHER; note = 2'-O-methyl modified nucleotide with phosphorothioate linkage
  modified_base 19: mod_base = OTHER; note = 2'-O-methyl modified nucleotide with phosphorothioate linkage
  modified_base 20: mod_base = OTHER; note = 2'-O-methyl modified nucleotide
gcactttgcttcacctctgc

SEQ ID NO: 370 - RNA, 20 nt, synthetic construct
  source 1..20: mol_type = other RNA
  modified_base 1: mod_base = OTHER; note = 2'-O-methyl modified nucleotide with phosphorothioate linkage
  modified_base 2: mod_base = OTHER; note = 2'-O-methyl modified nucleotide with phosphorothioate linkage
  modified_base 3: mod_base = OTHER; note = 2'-O-methyl modified nucleotide with phosphorothioate linkage
  modified_base 4: mod_base = OTHER; note = 2'-O-methyl modified nucleotide with phosphorothioate linkage
  modified_base 5: mod_base = OTHER; note = 2'-O-methyl modified nucleotide with phosphorothioate linkage
  modified_base 15: mod_base = OTHER; note = Nucleotide with phosphorothioate linkage
  modified_base 16: mod_base = OTHER; note = 2'-O-methyl modified nucleotide with phosphorothioate linkage
  modified_base 17: mod_base = OTHER; note = 2'-O-methyl modified nucleotide with phosphorothioate linkage
  modified_base 18: mod_base = OTHER; note = 2'-O-methyl modified nucleotide with phosphorothioate linkage
  modified_base 19: mod_base = OTHER; note = 2'-O-methyl modified nucleotide with phosphorothioate linkage
  modified_base 20: mod_base = OTHER; note = 2'-O-methyl modified nucleotide
gcacttcgtttcacctctgc

SEQ ID NO: 371 - RNA, 20 nt, synthetic construct
  source 1..20: mol_type = other RNA
  modified_base 1: mod_base = OTHER; note = 2'-O-methyl modified nucleotide with phosphorothioate linkage
  modified_base 2: mod_base = OTHER; note = 2'-O-methyl modified nucleotide with phosphorothioate linkage
  modified_base 3: mod_base = OTHER; note = 2'-O-methyl modified nucleotide with phosphorothioate linkage
  modified_base 4: mod_base = OTHER; note = 2'-O-methyl modified nucleotide with phosphorothioate linkage
  modified_base 5: mod_base = OTHER; note = 2'-O-methyl modified nucleotide with phosphorothioate linkage
  modified_base 15: mod_base = OTHER; note = Nucleotide with phosphorothioate linkage
  modified_base 16: mod_base = OTHER; note = 2'-O-methyl modified nucleotide with phosphorothioate linkage
  modified_base 17: mod_base = OTHER; note = 2'-O-methyl modified nucleotide with phosphorothioate linkage
  modified_base 18: mod_base = OTHER; note = 2'-O-methyl modified nucleotide with phosphorothioate linkage
  modified_base 19: mod_base = OTHER; note = 2'-O-methyl modified nucleotide with phosphorothioate linkage
  modified_base 20: mod_base = OTHER; note = 2'-O-methyl modified nucleotide
gcacttcgcttcacttctgc

SEQ ID NO: 372 - RNA, 20 nt, synthetic construct
  source 1..20: mol_type = other RNA
  modified_base 1: mod_base = OTHER; note = 2'-O-methyl modified nucleotide with phosphorothioate linkage
  modified_base 2: mod_base = OTHER; note = 2'-O-methyl modified nucleotide with phosphorothioate linkage
  modified_base 3: mod_base = OTHER; note = 2'-O-methyl modified nucleotide with phosphorothioate linkage
  modified_base 4: mod_base = OTHER; note = 2'-O-methyl modified nucleotide with phosphorothioate linkage
  modified_base 5: mod_base = OTHER; note = 2'-O-methyl modified nucleotide with phosphorothioate linkage
  modified_base 15: mod_base = OTHER; note = Nucleotide with phosphorothioate linkage
  modified_base 16: mod_base = OTHER; note = 2'-O-methyl modified nucleotide with phosphorothioate linkage
  modified_base 17: mod_base = OTHER; note = 2'-O-methyl modified nucleotide with phosphorothioate linkage
  modified_base 18: mod_base = OTHER; note = 2'-O-methyl modified nucleotide with phosphorothioate linkage
  modified_base 19: mod_base = OTHER; note = 2'-O-methyl modified nucleotide with phosphorothioate linkage
  modified_base 20: mod_base = OTHER; note = 2'-O-methyl modified nucleotide
gcatttcgcttcacctctgc

SEQ ID NO: 373 - RNA, 20 nt, synthetic construct
  source 1..20: mol_type = other RNA
  modified_base 1: mod_base = OTHER; note = 2'-O-methyl modified nucleotide with phosphorothioate linkage
  modified_base 2: mod_base = OTHER; note = 2'-O-methyl modified nucleotide with phosphorothioate linkage
  modified_base 3: mod_base = OTHER; note = 2'-O-methyl modified nucleotide with phosphorothioate linkage
  modified_base 4: mod_base = OTHER; note = 2'-O-methyl modified nucleotide with phosphorothioate linkage
  modified_base 5: mod_base = OTHER; note = 2'-O-methyl modified nucleotide with phosphorothioate linkage
  modified_base 15: mod_base = OTHER; note = Nucleotide with phosphorothioate linkage
  modified_base 16: mod_base = OTHER; note = 2'-O-methyl modified nucleotide with phosphorothioate linkage
  modified_base 17: mod_base = OTHER; note = 2'-O-methyl modified nucleotide with phosphorothioate linkage
  modified_base 18: mod_base = OTHER; note = 2'-O-methyl modified nucleotide with phosphorothioate linkage
  modified_base 19: mod_base = OTHER; note = 2'-O-methyl modified nucleotide with phosphorothioate linkage
  modified_base 20: mod_base = OTHER; note = 2'-O-methyl modified nucleotide
gcacttcgcttcacctttgc

SEQ ID NO: 374 - RNA, 20 nt, synthetic construct
  source 1..20: mol_type = other RNA
  modified_base 1: mod_base = OTHER; note = 2'-O-methyl modified nucleotide with phosphorothioate linkage
  modified_base 2: mod_base = OTHER; note = 2'-O-methyl modified nucleotide with phosphorothioate linkage
  modified_base 3: mod_base = OTHER; note = 2'-O-methyl modified nucleotide with phosphorothioate linkage
  modified_base 4: mod_base = OTHER; note = 2'-O-methyl modified nucleotide with phosphorothioate linkage
  modified_base 5: mod_base = OTHER; note = 2'-O-methyl modified nucleotide with phosphorothioate linkage
  modified_base 15: mod_base = OTHER; note = Nucleotide with phosphorothioate linkage
  modified_base 16: mod_base = OTHER; note = 2'-O-methyl modified nucleotide with phosphorothioate linkage
  modified_base 17: mod_base = OTHER; note = 2'-O-methyl modified nucleotide with phosphorothioate linkage
  modified_base 18: mod_base = OTHER; note = 2'-O-methyl modified nucleotide with phosphorothioate linkage
  modified_base 19: mod_base = OTHER; note = 2'-O-methyl modified nucleotide with phosphorothioate linkage
  modified_base 20: mod_base = OTHER; note = 2'-O-methyl modified nucleotide
gcactttgcttcacttctgc

SEQ ID NO: 375 - RNA, 20 nt, synthetic construct
  source 1..20: mol_type = other RNA
  modified_base 1: mod_base = OTHER; note = 2'-O-methyl modified nucleotide with phosphorothioate linkage
  modified_base 2: mod_base = OTHER; note = 2'-O-methyl modified nucleotide with phosphorothioate linkage
  modified_base 3: mod_base = OTHER; note = 2'-O-methyl modified nucleotide with phosphorothioate linkage
  modified_base 4: mod_base = OTHER; note = 2'-O-methyl modified nucleotide with phosphorothioate linkage
  modified_base 5: mod_base = OTHER; note = 2'-O-methyl modified nucleotide with phosphorothioate linkage
  modified_base 15: mod_base = OTHER; note = Nucleotide with phosphorothioate linkage
  modified_base 16: mod_base = OTHER; note = 2'-O-methyl modified nucleotide with phosphorothioate linkage
  modified_base 17: mod_base = OTHER; note = 2'-O-methyl modified nucleotide with phosphorothioate linkage
  modified_base 18: mod_base = OTHER; note = 2'-O-methyl modified nucleotide with phosphorothioate linkage
  modified_base 19: mod_base = OTHER; note = 2'-O-methyl modified nucleotide with phosphorothioate linkage
  modified_base 20: mod_base = OTHER; note = 2'-O-methyl modified nucleotide
gcactttgtttcacctctgc

SEQ ID NO: 376 - RNA, 20 nt, synthetic construct
  source 1..20: mol_type = other RNA
  modified_base 1: mod_base = OTHER; note = 2'-O-methyl modified nucleotide with phosphorothioate linkage
  modified_base 2: mod_base = OTHER; note = 2'-O-methyl modified nucleotide with phosphorothioate linkage
  modified_base 3: mod_base = OTHER; note = 2'-O-methyl modified nucleotide with phosphorothioate linkage
  modified_base 4: mod_base = OTHER; note = 2'-O-methyl modified nucleotide with phosphorothioate linkage
  modified_base 5: mod_base = OTHER; note = 2'-O-methyl modified nucleotide with phosphorothioate linkage
  modified_base 15: mod_base = OTHER; note = Nucleotide with phosphorothioate linkage
  modified_base 16: mod_base = OTHER; note = 2'-O-methyl modified nucleotide with phosphorothioate linkage
  modified_base 17: mod_base = OTHER; note = 2'-O-methyl modified nucleotide with phosphorothioate linkage
  modified_base 18: mod_base = OTHER; note = 2'-O-methyl modified nucleotide with phosphorothioate linkage
  modified_base 19: mod_base = OTHER; note = 2'-O-methyl modified nucleotide with phosphorothioate linkage
  modified_base 20: mod_base = OTHER; note = 2'-O-methyl modified nucleotide
gcatttcgcttcacctttgc

SEQ ID NO: 377 - RNA, 21 nt, synthetic construct
  source 1..21: mol_type = other RNA
cgcgcgcgcagaagcgtgcgc

SEQ ID NO: 378 - RNA, 21 nt, synthetic construct
  source 1..21: mol_type = other RNA
cggctcggcagaagccgggcc

SEQ ID NO: 379 - RNA, 20 nt, synthetic construct
  source 1..20: mol_type = other RNA
gcacttcgcttcacctctgc

SEQ ID NO: 380 - RNA, 20 nt, synthetic construct
  source 1..20: mol_type = other RNA
ctctctctctctctctctgt

SEQ ID NO: 381 - RNA, 20 nt, synthetic construct
  source 1..20: mol_type = other RNA
ctctctgtctgtctgtctgt

SEQ ID NO: 382 - RNA, 20 nt, synthetic construct
  source 1..20: mol_type = other RNA
ctgtctgtctgtctgtctgt

SEQ ID NO: 383 - RNA, 20 nt, synthetic construct
  source 1..20: mol_type = other RNA
  modified_base 18: mod_base = OTHER; note = Nucleotide with phosphorothioate linkage
ctctctctctctctctctgt

SEQ ID NO: 384 - RNA, 20 nt, synthetic construct
  source 1..20: mol_type = other RNA
  modified_base 6: mod_base = OTHER; note = Nucleotide with phosphorothioate linkage
  modified_base 10: mod_base = OTHER; note = Nucleotide with phosphorothioate linkage
  modified_base 14: mod_base = OTHER; note = Nucleotide with phosphorothioate linkage
  modified_base 18: mod_base = OTHER; note = Nucleotide with phosphorothioate linkage
ctctctgtctgtctgtctgt

SEQ ID NO: 385 - RNA, 20 nt, synthetic construct
  source 1..20: mol_type = other RNA
  modified_base 2: mod_base = OTHER; note = Nucleotide with phosphorothioate linkage
  modified_base 6: mod_base = OTHER; note = Nucleotide with phosphorothioate linkage
  modified_base 10: mod_base = OTHER; note = Nucleotide with phosphorothioate linkage
  modified_base 14: mod_base = OTHER; note = Nucleotide with phosphorothioate linkage
  modified_base 18: mod_base = OTHER; note = Nucleotide with phosphorothioate linkage
ctgtctgtctgtctgtctgt

SEQ ID NO: 386 - RNA, 20 nt, synthetic construct
  source 1..20: mol_type = other RNA
ctctctatctatctatctat

SEQ ID NO: 387 - RNA, 20 nt, synthetic construct
  source 1..20: mol_type = other RNA
ctatctatctatctatctat

SEQ ID NO: 388-400 - skipped (13 entries)

SEQ ID NO: 401 - RNA, 20 nt, synthetic construct
  source 1..20: mol_type = other RNA
  modified_base 1: mod_base = OTHER; note = 2'-O-methyl modified nucleotide with phosphorothioate linkage
  modified_base 2: mod_base = OTHER; note = 2'-O-methyl modified nucleotide with phosphorothioate linkage
  modified_base 3: mod_base = OTHER; note = 2'-O-methyl modified nucleotide with phosphorothioate linkage
  modified_base 4: mod_base = OTHER; note = 2'-O-methyl modified nucleotide with phosphorothioate linkage
  modified_base 5: mod_base = OTHER; note = 2'-O-methyl modified nucleotide with phosphorothioate linkage
  modified_base 15: mod_base = OTHER; note = Nucleotide with phosphorothioate linkage
  modified_base 16: mod_base = OTHER; note = Nucleotide with phosphorothioate linkage
  modified_base 17: mod_base = OTHER; note = 2'-O-methyl modified nucleotide with phosphorothioate linkage
  modified_base 18: mod_base = OTHER; note = Nucleotide with phosphorothioate linkage
  modified_base 19: mod_base = OTHER; note = 2'-O-methyl-3'-xylo modified nucleotide with phosphorothioate linkage
  modified_base 20: mod_base = OTHER; note = 2'-O-methyl modified nucleotide
gcacttcgcttcacctctgc

SEQ ID NO: 402 - skipped

SEQ ID NO: 403 - RNA, 20 nt, synthetic construct
  source 1..20: mol_type = other RNA
tgcacttcgcttcacctctg

SEQ ID NO: 404 - RNA, 20 nt, synthetic construct
  source 1..20: mol_type = other RNA
ttcgcttcacctctgcacgt

SEQ ID NO: 405-445 - skipped (41 entries)

SEQ ID NO: 446 - RNA, 20 nt, synthetic construct
  source 1..20: mol_type = other RNA
  modified_base 1: mod_base = OTHER; note = 2'-O-methoxyethyl modified nucleotide with phosphorothioate linkage
  modified_base 2: mod_base = OTHER; note = 2'-O-methoxyethyl 5-methylcytosine with phosphorothioate linkage
  modified_base 3: mod_base = OTHER; note = 2'-O-methoxyethyl 5-methylcytosine with phosphorothioate linkage
  modified_base 4: mod_base = OTHER; note = 2'-O-methoxyethyl 5-methylcytosine with phosphorothioate linkage
  modified_base 5: mod_base = OTHER; note = 2'-O-methoxyethyl modified nucleotide with phosphorothioate linkage
  modified_base 6: mod_base = OTHER; note = 2'-O-methoxyethyl modified thymine with phosphorothioate linkage
  modified_base 7: mod_base = OTHER; note = 2'-O-methoxyethyl 5-methylcytosine with phosphorothioate linkage
  modified_base 8: mod_base = OTHER; note = 2'-O-methoxyethyl modified thymine with phosphorothioate linkage
  modified_base 9: mod_base = OTHER; note = 2'-O-methoxyethyl modified nucleotide with phosphorothioate linkage
  modified_base 10: mod_base = OTHER; note = 2'-O-methoxyethyl modified thymine with phosphorothioate linkage
  modified_base 11: mod_base = OTHER; note = 2'-O-methoxyethyl modified thymine with phosphorothioate linkage
  modified_base 12: mod_base = OTHER; note = 2'-O-methoxyethyl modified nucleotide with phosphorothioate linkage
  modified_base 13: mod_base = OTHER; note = 2'-O-methoxyethyl modified thymine with phosphorothioate linkage
  modified_base 14: mod_base = OTHER; note = 2'-O-methoxyethyl modified nucleotide with phosphorothioate linkage
  modified_base 15: mod_base = OTHER; note = 2'-O-methoxyethyl modified thymine with phosphorothioate linkage
  modified_base 16: mod_base = OTHER; note = 2'-O-methoxyethyl modified nucleotide with phosphorothioate linkage
  modified_base 17: mod_base = OTHER; note = 2'-O-methoxyethyl modified nucleotide with phosphorothioate linkage
  modified_base 18: mod_base = OTHER; note = 2'-O-methoxyethyl 5-methylcytosine with phosphorothioate linkage
  modified_base 19: mod_base = OTHER; note = 2'-O-methoxyethyl modified thymine with phosphorothioate linkage
  modified_base 20: mod_base = OTHER; note = 2'-O-methoxyethyl 5-methylcytosine
gcccgtctgttgtgtgactc

SEQ ID NO: 447 - DNA, 20 bp, synthetic construct
  source 1..20: mol_type = other DNA
  modified_base 1: mod_base = OTHER; note = 2'-O-methoxyethyl 5-methylcytosine with phosphorothioate linkage
  modified_base 2: mod_base = OTHER; note = 2'-O-methoxyethyl modified nucleotide with phosphorothioate linkage
  modified_base 3: mod_base = OTHER; note = 2'-O-methoxyethyl modified nucleotide with phosphorothioate linkage
  modified_base 4: mod_base = OTHER; note = 2'-O-methoxyethyl modified nucleotide with R-stereo-defined phosphorothioate linkage
  modified_base 5: mod_base = OTHER; note = 2'-O-methoxyethyl modified nucleotide with phosphorothioate linkage
  modified_base 6: mod_base = OTHER; note = Nucleotide with phosphorothioate linkage
  modified_base 7: mod_base = OTHER; note = Thymine with phosphorothioate linkage
  modified_base 8: mod_base = OTHER; note = Nucleotide with phosphorothioate linkage
  modified_base 9: mod_base = OTHER; note = Nucleotide with phosphorothioate linkage
  modified_base 10: mod_base = OTHER; note = Nucleotide with phosphorothioate linkage
  modified_base 11: mod_base = OTHER; note = Nucleotide with phosphorothioate linkage
  modified_base 12: mod_base = OTHER; note = 5-methylcytosine with phosphorothioate linkage
  modified_base 13: mod_base = OTHER; note = Nucleotide with phosphorothioate linkage
  modified_base 14: mod_base = OTHER; note = Nucleotide with phosphorothioate linkage
  modified_base 15: mod_base = OTHER; note = Nucleotide with phosphorothioate linkage
  modified_base 16: mod_base = OTHER; note = 2'-O-methoxyethyl modified nucleotide with phosphorothioate linkage
  modified_base 17: mod_base = OTHER; note = 2'-O-methoxyethyl modified thymine with phosphorothioate linkage
  modified_base 18: mod_base = OTHER; note = 2'-O-methoxyethyl modified nucleotide with phosphorothioate linkage
  modified_base 19: mod_base = OTHER; note = 2'-O-methoxyethyl 5-methylcytosine with phosphorothioate linkage
  modified_base 20: mod_base = OTHER; note = 2'-O-methoxyethyl modified nucleotide
  misc_feature 1..5: note = RNA
  misc_feature 6..15: note = DNA
  misc_feature 16..20: note = RNA
cagaggtgaagcgaagtgca

SEQ ID NO: 448 - DNA, 20 bp, synthetic construct
  source 1..20: mol_type = other DNA
  modified_base 1: mod_base = OTHER; note = 2'-O-methoxyethyl 5-methylcytosine with phosphorothioate linkage
  modified_base 2: mod_base = OTHER; note = 2'-O-methoxyethyl modified nucleotide with phosphorothioate linkage
  modified_base 3: mod_base = OTHER; note = 2'-O-methoxyethyl modified nucleotide with R-stereo-defined phosphorothioate linkage
  modified_base 4: mod_base = OTHER; note = 2'-O-methoxyethyl modified nucleotide with phosphorothioate linkage
  modified_base 5: mod_base = OTHER; note = 2'-O-methoxyethyl modified nucleotide with phosphorothioate linkage
  modified_base 6: mod_base = OTHER; note = Nucleotide with phosphorothioate linkage
  modified_base 7: mod_base = OTHER; note = Thymine with phosphorothioate linkage
  modified_base 8: mod_base = OTHER; note = Nucleotide with phosphorothioate linkage
  modified_base 9: mod_base = OTHER; note = Nucleotide with phosphorothioate linkage
  modified_base 10: mod_base = OTHER; note = Nucleotide with phosphorothioate linkage
  modified_base 11: mod_base = OTHER; note = Nucleotide with phosphorothioate linkage
  modified_base 12: mod_base = OTHER; note = 5-methylcytosine with phosphorothioate linkage
  modified_base 13: mod_base = OTHER; note = Nucleotide with phosphorothioate linkage
  modified_base 14: mod_base = OTHER; note = Nucleotide with phosphorothioate linkage
  modified_base 15: mod_base = OTHER; note = Nucleotide with phosphorothioate linkage
  modified_base 16: mod_base = OTHER; note = 2'-O-methoxyethyl modified nucleotide with phosphorothioate linkage
  modified_base 17: mod_base = OTHER; note = 2'-O-methoxyethyl modified thymine with phosphorothioate linkage
  modified_base 18: mod_base = OTHER; note = 2'-O-methoxyethyl modified nucleotide with phosphorothioate linkage
  modified_base 19: mod_base = OTHER; note = 2'-O-methoxyethyl 5-methylcytosine with phosphorothioate linkage
  modified_base 20: mod_base = OTHER; note = 2'-O-methoxyethyl modified nucleotide
  misc_feature 1..5: note = RNA
  misc_feature 6..15: note = DNA
  misc_feature 16..20: note = RNA
cagaggtgaagcgaagtgca

SEQ ID NO: 449 - DNA, 20 bp, synthetic construct
  source 1..20: mol_type = other DNA
  modified_base 1: mod_base = OTHER; note = 2'-O-methoxyethyl 5-methylcytosine with phosphorothioate linkage
  modified_base 2: mod_base = OTHER; note = 2'-O-methoxyethyl modified nucleotide with R-stereo-defined phosphorothioate linkage
  modified_base 3: mod_base = OTHER; note = 2'-O-methoxyethyl modified nucleotide with phosphorothioate linkage
  modified_base 4: mod_base = OTHER; note = 2'-O-methoxyethyl modified nucleotide with phosphorothioate linkage
  modified_base 5: mod_base = OTHER; note = 2'-O-methoxyethyl modified nucleotide with phosphorothioate linkage
  modified_base 6: mod_base = OTHER; note = Nucleotide with phosphorothioate linkage
  modified_base 7: mod_base = OTHER; note = Thymine with phosphorothioate linkage
  modified_base 8: mod_base = OTHER; note = Nucleotide with phosphorothioate linkage
  modified_base 9: mod_base = OTHER; note = Nucleotide with phosphorothioate linkage
  modified_base 10: mod_base = OTHER; note = Nucleotide with phosphorothioate linkage
  modified_base 11: mod_base = OTHER; note = Nucleotide with phosphorothioate linkage
  modified_base 12: mod_base = OTHER; note = 5-methylcytosine with phosphorothioate linkage
  modified_base 13: mod_base = OTHER; note = Nucleotide with phosphorothioate linkage
  modified_base 14: mod_base = OTHER; note = Nucleotide with phosphorothioate linkage
  modified_base 15: mod_base = OTHER; note = Nucleotide with phosphorothioate linkage
  modified_base 16: mod_base = OTHER; note = 2'-O-methoxyethyl modified nucleotide with phosphorothioate linkage
  modified_base 17: mod_base = OTHER; note = 2'-O-methoxyethyl modified thymine with phosphorothioate linkage
  modified_base 18: mod_base = OTHER; note = 2'-O-methoxyethyl modified nucleotide with phosphorothioate linkage
  modified_base 19: mod_base = OTHER; note = 2'-O-methoxyethyl 5-methylcytosine with phosphorothioate linkage
  modified_base 20: mod_base = OTHER; note = 2'-O-methoxyethyl modified nucleotide
  misc_feature 1..5: note = RNA
  misc_feature 6..15: note = DNA
  misc_feature 16..20: note = RNA
cagaggtgaagcgaagtgca

SEQ ID NO: 450 - DNA, 20 bp, synthetic construct
  source 1..20: mol_type = other DNA
  modified_base 1: mod_base = OTHER; note = 2'-O-methoxyethyl 5-methylcytosine with R-stereo-defined phosphorothioate linkage
  modified_base 2: mod_base = OTHER; note = 2'-O-methoxyethyl modified nucleotide with phosphorothioate linkage
  modified_base 3: mod_base = OTHER; note = 2'-O-methoxyethyl modified nucleotide with phosphorothioate linkage
  modified_base 4: mod_base = OTHER; note = 2'-O-methoxyethyl modified nucleotide with phosphorothioate linkage
  modified_base 5: mod_base = OTHER; note = 2'-O-methoxyethyl modified nucleotide with phosphorothioate linkage
  modified_base 6: mod_base = OTHER; note = Nucleotide with phosphorothioate linkage
  modified_base 7: mod_base = OTHER; note = Thymine with phosphorothioate linkage
  modified_base 8: mod_base = OTHER; note = Nucleotide with phosphorothioate linkage
  modified_base 9: mod_base = OTHER; note = Nucleotide with phosphorothioate linkage
  modified_base 10: mod_base = OTHER; note = Nucleotide with phosphorothioate linkage
  modified_base 11: mod_base = OTHER; note = Nucleotide with phosphorothioate linkage
  modified_base 12: mod_base = OTHER; note = 5-methylcytosine with phosphorothioate linkage
  modified_base 13: mod_base = OTHER; note = Nucleotide with phosphorothioate linkage
  modified_base 14: mod_base = OTHER; note = Nucleotide with phosphorothioate linkage
  modified_base 15: mod_base = OTHER; note = Nucleotide with phosphorothioate linkage
  modified_base 16: mod_base = OTHER; note = 2'-O-methoxyethyl modified nucleotide with phosphorothioate linkage
  modified_base 17: mod_base = OTHER; note = 2'-O-methoxyethyl modified thymine with phosphorothioate linkage
  modified_base 18: mod_base = OTHER; note = 2'-O-methoxyethyl modified nucleotide with phosphorothioate linkage
  modified_base 19: mod_base = OTHER; note = 2'-O-methoxyethyl 5-methylcytosine with phosphorothioate linkage
  modified_base 20: mod_base = OTHER; note = 2'-O-methoxyethyl modified nucleotide
  misc_feature 1..5: note = RNA
  misc_feature 6..15: note = DNA
  misc_feature 16..20: note = RNA
cagaggtgaagcgaagtgca

SEQ ID NO: 451 - DNA, 20 bp, synthetic construct
  source 1..20: mol_type = other DNA
  modified_base 1: mod_base = OTHER; note = 2'-O-methoxyethyl 5-methylcytosine with R-stereo-defined phosphorothioate linkage
  modified_base 2: mod_base = OTHER; note = 2'-O-methoxyethyl modified nucleotide with phosphorothioate linkage
  modified_base 3: mod_base = OTHER; note = 2'-O-methoxyethyl modified nucleotide with phosphorothioate linkage
  modified_base 4: mod_base = OTHER; note = 2'-O-methoxyethyl modified nucleotide with R-stereo-defined phosphorothioate linkage
  modified_base 5: mod_base = OTHER; note = 2'-O-methoxyethyl modified nucleotide with phosphorothioate linkage
  modified_base 6: mod_base = OTHER; note = Nucleotide with phosphorothioate linkage
  modified_base 7: mod_base = OTHER; note = Thymine with phosphorothioate linkage
  modified_base 8: mod_base = OTHER; note = Nucleotide with phosphorothioate linkage
  modified_base 9: mod_base = OTHER; note = Nucleotide with phosphorothioate linkage
  modified_base 10: mod_base = OTHER; note = Nucleotide with phosphorothioate linkage
  modified_base 11: mod_base = OTHER; note = Nucleotide with phosphorothioate linkage
  modified_base 12: mod_base = OTHER; note = 5-methylcytosine with phosphorothioate linkage
  modified_base 13: mod_base = OTHER; note = Nucleotide with phosphorothioate linkage
  modified_base 14: mod_base = OTHER; note = Nucleotide with phosphorothioate linkage
  modified_base 15: mod_base = OTHER; note = Nucleotide with phosphorothioate linkage
  modified_base 16: mod_base = OTHER; note = 2'-O-methoxyethyl modified nucleotide with phosphorothioate linkage
  modified_base 17: mod_base = OTHER; note = 2'-O-methoxyethyl modified thymine with phosphorothioate linkage
  modified_base 18: mod_base = OTHER; note = 2'-O-methoxyethyl modified nucleotide with phosphorothioate linkage
  modified_base 19: mod_base = OTHER; note = 2'-O-methoxyethyl 5-methylcytosine with phosphorothioate linkage
  modified_base 20: mod_base = OTHER; note = 2'-O-methoxyethyl modified nucleotide
  misc_feature 1..5: note = RNA
  misc_feature 6..15: note = DNA
  misc_feature 16..20: note = RNA
cagaggtgaagcgaagtgca

SEQ ID NO: 452 - DNA, 20 bp, synthetic construct
  source 1..20: mol_type = other DNA
  modified_base 1: mod_base = OTHER; note = 2'-O-methoxyethyl 5-methylcytosine with R-stereo-defined phosphorothioate linkage
  modified_base 2: mod_base = OTHER; note = 2'-O-methoxyethyl modified nucleotide with phosphorothioate linkage
  modified_base 3: mod_base = OTHER; note = 2'-O-methoxyethyl modified nucleotide with R-stereo-defined phosphorothioate linkage
  modified_base 4: mod_base = OTHER; note = 2'-O-methoxyethyl modified nucleotide with phosphorothioate linkage
  modified_base 5: mod_base = OTHER; note = 2'-O-methoxyethyl modified nucleotide with phosphorothioate linkage
  modified_base 6: mod_base = OTHER; note = Nucleotide with phosphorothioate linkage
  modified_base 7: mod_base = OTHER; note = Thymine with phosphorothioate linkage
  modified_base 8: mod_base = OTHER; note = Nucleotide with phosphorothioate linkage
  modified_base 9: mod_base = OTHER; note = Nucleotide with phosphorothioate linkage
  modified_base 10: mod_base = OTHER; note = Nucleotide with phosphorothioate linkage
  modified_base 11: mod_base = OTHER; note = Nucleotide with phosphorothioate linkage
  modified_base 12: mod_base = OTHER; note = 5-methylcytosine with phosphorothioate linkage
  modified_base 13: mod_base = OTHER; note = Nucleotide with phosphorothioate linkage
  modified_base 14: mod_base = OTHER; note = Nucleotide with phosphorothioate linkage
  modified_base 15: mod_base = OTHER; note = Nucleotide with phosphorothioate linkage
  modified_base 16: mod_base = OTHER; note = 2'-O-methoxyethyl modified nucleotide with phosphorothioate linkage
  modified_base 17: mod_base = OTHER; note = 2'-O-methoxyethyl modified thymine with phosphorothioate linkage
  modified_base 18: mod_base = OTHER; note = 2'-O-methoxyethyl modified nucleotide with phosphorothioate linkage
  modified_base 19: mod_base = OTHER; note = 2'-O-methoxyethyl 5-methylcytosine with phosphorothioate linkage
  modified_base 20: mod_base = OTHER; note = 2'-O-methoxyethyl modified nucleotide
  misc_feature 1..5: note = RNA
  misc_feature 6..15: note = DNA
  misc_feature 16..20: note = RNA
cagaggtgaagcgaagtgca

SEQ ID NO: 453 - DNA, 20 bp, synthetic construct
  source 1..20: mol_type = other DNA
  modified_base 1: mod_base = OTHER; note = 2'-O-methoxyethyl 5-methylcytosine with phosphorothioate linkage
  modified_base 2: mod_base = OTHER; note = 2'-O-methoxyethyl modified nucleotide with R-stereo-defined phosphorothioate linkage
  modified_base 3: mod_base = OTHER; note = 2'-O-methoxyethyl modified nucleotide with phosphorothioate linkage
  modified_base 4: mod_base = OTHER; note = 2'-O-methoxyethyl modified nucleotide with R-stereo-defined phosphorothioate linkage
  modified_base 5: mod_base = OTHER; note = 2'-O-methoxyethyl modified nucleotide with phosphorothioate linkage
  modified_base 6: mod_base = OTHER; note = Nucleotide with phosphorothioate linkage
  modified_base 7: mod_base = OTHER; note = Thymine with phosphorothioate linkage
  modified_base 8: mod_base = OTHER; note = Nucleotide with phosphorothioate linkage
  modified_base 9: mod_base = OTHER; note = Nucleotide with phosphorothioate linkage
  modified_base 10: mod_base = OTHER; note = Nucleotide with phosphorothioate linkage
  modified_base 11: mod_base = OTHER; note = Nucleotide with phosphorothioate linkage
  modified_base 12: mod_base = OTHER; note = 5-methylcytosine with phosphorothioate linkage
  modified_base 13: mod_base = OTHER; note = Nucleotide with phosphorothioate linkage
  modified_base 14: mod_base = OTHER; note = Nucleotide with phosphorothioate linkage
  modified_base 15: mod_base = OTHER; note = Nucleotide with phosphorothioate linkage
  modified_base 16: mod_base = OTHER; note = 2'-O-methoxyethyl modified nucleotide with phosphorothioate linkage
  modified_base 17: mod_base = OTHER; note = 2'-O-methoxyethyl modified thymine with phosphorothioate linkage
  modified_base 18: mod_base = OTHER; note = 2'-O-methoxyethyl modified nucleotide with phosphorothioate linkage
  modified_base 19: mod_base = OTHER; note = 2'-O-methoxyethyl 5-methylcytosine with phosphorothioate linkage
  modified_base 20: mod_base = OTHER; note = 2'-O-methoxyethyl modified nucleotide
  misc_feature 1..5: note = RNA
  misc_feature 6..15: note = DNA
  misc_feature 16..20: note = RNA
cagaggtgaagcgaagtgca

SEQ ID NO: 454 - DNA, 20 bp, synthetic construct
  source 1..20: mol_type = other DNA
  modified_base 1: mod_base = OTHER; note = 2'-O-methoxyethyl 5-methylcytosine with phosphorothioate linkage
  modified_base 2: mod_base = OTHER; note = 2'-O-methoxyethyl modified nucleotide with phosphorothioate linkage
  modified_base 3: mod_base = OTHER; note = 2'-O-methoxyethyl modified nucleotide with phosphorothioate linkage
  modified_base 4: mod_base = OTHER; note = 2'-O-methoxyethyl modified nucleotide with phosphorothioate linkage
  modified_base 5: mod_base = OTHER; note = 2'-O-methoxyethyl modified nucleotide with phosphorothioate linkage
  modified_base 6: mod_base = OTHER; note = Nucleotide with phosphorothioate linkage
  modified_base 7: mod_base = OTHER; note = Thymine with phosphorothioate linkage
  modified_base 8: mod_base = OTHER; note = Nucleotide with phosphorothioate linkage
  modified_base 9: mod_base = OTHER; note = Nucleotide with phosphorothioate linkage
  modified_base 10: mod_base = OTHER; note = Nucleotide with phosphorothioate linkage
  modified_base 11: mod_base = OTHER; note = 8-amino-guanosine with phosphorothioate linkage
  modified_base 12: mod_base = OTHER; note = 5-methylcytosine with phosphorothioate linkage
  modified_base 13: mod_base = OTHER; note = Nucleotide with phosphorothioate linkage
  modified_base 14: mod_base = OTHER; note = Nucleotide with phosphorothioate linkage
  modified_base 15: mod_base = OTHER; note = Nucleotide with phosphorothioate linkage
  modified_base 16: mod_base = OTHER; note = 2'-O-methoxyethyl modified nucleotide with phosphorothioate linkage
  modified_base 17: mod_base = OTHER; note = 2'-O-methoxyethyl modified thymine with phosphorothioate linkage
  modified_base 18: mod_base = OTHER; note = 2'-O-methoxyethyl modified nucleotide with phosphorothioate linkage
  modified_base 19: mod_base = OTHER; note = 2'-O-cyclopropyl modified 5-methylcytosine with phosphorothioate linkage
  modified_base 20: mod_base = OTHER; note = 2'-O-methoxyethyl modified nucleotide
  misc_feature 1..5: note = RNA
  misc_feature 6..15: note = DNA
  misc_feature 16..20: note = RNA
cagaggtgaagcgaagtgca

SEQ ID NO: 455 - DNA, 20 bp, synthetic construct
  source 1..20: mol_type = other DNA
  modified_base 1: mod_base = OTHER; note = 2'-O-methoxyethyl 5-methylcytosine with phosphorothioate linkage
  modified_base 2: mod_base = OTHER; note = 2'-O-methoxyethyl modified nucleotide with phosphorothioate linkage
  modified_base 3: mod_base = OTHER; note = 2'-O-methoxyethyl modified nucleotide with phosphorothioate linkage
  modified_base 4: mod_base = OTHER; note = 2'-O-methoxyethyl modified nucleotide with phosphorothioate linkage
  modified_base 5: mod_base = OTHER; note = 2'-O-methoxyethyl modified nucleotide with phosphorothioate linkage
  modified_base 6: mod_base = OTHER; note = Nucleotide with phosphorothioate linkage
  modified_base 7: mod_base = OTHER; note = Thymine with phosphorothioate linkage
  modified_base 8: mod_base = OTHER; note = Nucleotide with phosphorothioate linkage
  modified_base 9: mod_base = OTHER; note = Nucleotide with phosphorothioate linkage
  modified_base 10: mod_base = OTHER; note = Nucleotide with phosphorothioate linkage
  modified_base 11: mod_base = OTHER; note = 8-amino-guanosine with phosphorothioate linkage
  modified_base 12: mod_base = OTHER; note = 5-methylcytosine with phosphorothioate linkage
  modified_base 13: mod_base = OTHER; note = Nucleotide with phosphorothioate linkage
  modified_base 14: mod_base = OTHER; note = Nucleotide with phosphorothioate linkage
  modified_base 15: mod_base = OTHER; note = Nucleotide with phosphorothioate linkage
  modified_base 16: mod_base = OTHER; note = 2'-O-methoxyethyl modified nucleotide with phosphorothioate linkage
  modified_base 17: mod_base = OTHER; note = 2'-O-cyclopropyl modified thymine with phosphorothioate linkage
  modified_base 18: mod_base = OTHER; note = 2'-O-methoxyethyl modified nucleotide with phosphorothioate linkage
  modified_base 19: mod_base = OTHER; note = 2'-O-cyclopropyl modified 5-methylcytosine with phosphorothioate linkage
  modified_base 20: mod_base = OTHER; note = 2'-O-methoxyethyl modified nucleotide
  misc_feature 1..5: note = RNA
  misc_feature 6..15: note = DNA
  misc_feature 16..20: note = RNA
cagaggtgaagcgaagtgca

SEQ ID NO: 456 - DNA, 20 bp, synthetic construct
  source 1..20: mol_type = other DNA
  modified_base 1: mod_base = OTHER; note = 2'-O-cyclopropyl modified 5-methylcytosine with phosphorothioate linkage
  modified_base 2: mod_base = OTHER; note = 2'-O-methoxyethyl modified nucleotide with phosphorothioate linkage
  modified_base 3: mod_base = OTHER; note = 2'-O-methoxyethyl modified nucleotide with phosphorothioate linkage
  modified_base 4: mod_base = OTHER; note = 2'-O-methoxyethyl modified nucleotide with phosphorothioate linkage
  modified_base 5: mod_base = OTHER; note = 2'-O-methoxyethyl modified nucleotide with phosphorothioate linkage
  modified_base 6: mod_base = OTHER; note = Nucleotide with phosphorothioate linkage
  modified_base 7: mod_base = OTHER; note = Thymine with phosphorothioate linkage
  modified_base 8: mod_base = OTHER; note = Nucleotide with phosphorothioate linkage
  modified_base 9: mod_base = OTHER; note = Nucleotide with phosphorothioate linkage
  modified_base 10: mod_base = OTHER; note = Nucleotide with phosphorothioate linkage
  modified_base 11: mod_base = OTHER; note = 8-amino-guanosine with phosphorothioate linkage
  modified_base 12: mod_base = OTHER; note = 5-methylcytosine with phosphorothioate linkage
  modified_base 13: mod_base = OTHER; note = Nucleotide with phosphorothioate linkage
  modified_base 14: mod_base = OTHER; note = Nucleotide with phosphorothioate linkage
  modified_base 15: mod_base = OTHER; note = Nucleotide with phosphorothioate linkage
  modified_base 16: mod_base = OTHER; note = 2'-O-methoxyethyl modified nucleotide with phosphorothioate linkage
  modified_base 17: mod_base = OTHER; note = 2'-O-cyclopropyl modified thymine with phosphorothioate linkage
  modified_base 18: mod_base = OTHER; note = 2'-O-methoxyethyl modified nucleotide with phosphorothioate linkage
  modified_base 19: mod_base = OTHER; note = 2'-O-methoxyethyl 5-methylcytosine with phosphorothioate linkage
  modified_base 20: mod_base = OTHER; note = 2'-O-methoxyethyl modified nucleotide
  misc_feature 1..5: note = RNA
  misc_feature 6..15: note = DNA
  misc_feature 16..20: note = RNA
cagaggtgaagcgaagtgca

SEQ ID NO: 457 - DNA, 20 bp, synthetic construct
  source 1..20: mol_type = other DNA
  modified_base 1: mod_base = OTHER; note = 2'-O-cyclopropyl modified 5-methylcytosine with phosphorothioate linkage
  modified_base 2: mod_base = OTHER; note = 2'-O-methoxyethyl modified nucleotide with phosphorothioate linkage
  modified_base 3: mod_base = OTHER; note = 2'-O-methoxyethyl modified nucleotide with phosphorothioate linkage
  modified_base 4: mod_base = OTHER; note = 2'-O-methoxyethyl modified nucleotide with phosphorothioate linkage
  modified_base 5: mod_base = OTHER; note = 2'-O-methoxyethyl modified nucleotide with phosphorothioate linkage
  modified_base 6: mod_base = OTHER; note = Nucleotide with phosphorothioate linkage
  modified_base 7: mod_base = OTHER; note = Thymine with phosphorothioate linkage
  modified_base 8: mod_base = OTHER; note = Nucleotide with phosphorothioate linkage
  modified_base 9: mod_base = OTHER; note = Nucleotide with phosphorothioate linkage
  modified_base 10: mod_base = OTHER; note = Nucleotide with phosphorothioate linkage
  modified_base 11: mod_base = OTHER; note = 8-amino-guanosine with phosphorothioate linkage
  modified_base 12: mod_base = OTHER; note = 5-methylcytosine with phosphorothioate linkage
  modified_base 13: mod_base = OTHER; note = Nucleotide with phosphorothioate linkage
  modified_base 14: mod_base = OTHER; note = Nucleotide with phosphorothioate linkage
  modified_base 15: mod_base = OTHER; note = Nucleotide with phosphorothioate linkage
  modified_base 16: mod_base = OTHER; note = 2'-O-methoxyethyl modified nucleotide with phosphorothioate linkage
  modified_base 17: mod_base = OTHER; note = 2'-O-methoxyethyl modified thymine with phosphorothioate linkage
  modified_base 18: mod_base = OTHER; note = 2'-O-methoxyethyl modified nucleotide with phosphorothioate linkage
  modified_base 19: mod_base = OTHER; note = 2'-O-cyclopropyl modified 5-methylcytosine with phosphorothioate linkage
  modified_base 20: mod_base = OTHER; note = 2'-O-methoxyethyl modified nucleotide
  misc_feature 1..5: note = RNA
  misc_feature 6..15: note = DNA
  misc_feature 16..20: note = RNA
cagaggtgaagcgaagtgca

SEQ ID NO: 458 - DNA, 20 bp, synthetic construct
  source 1..20: mol_type = other DNA
  modified_base 1: mod_base = OTHER; note = 2'-O-methoxyethyl 5-methylcytosine with phosphorothioate linkage
  modified_base 2: mod_base = OTHER; note = 2'-O-cyclopropyl modified nucleotide with phosphorothioate linkage
  modified_base 3: mod_base = OTHER; note = 2'-O-methoxyethyl modified nucleotide with phosphorothioate linkage
  modified_base 4: mod_base = OTHER; note = 2'-O-cyclopropyl modified nucleotide with phosphorothioate linkage
  modified_base 5: mod_base = OTHER; note = 2'-O-methoxyethyl modified nucleotide with phosphorothioate linkage
  modified_base 6: mod_base = OTHER; note = Nucleotide with phosphorothioate linkage
  modified_base 7: mod_base = OTHER; note = Thymine with phosphorothioate linkage
  modified_base 8: mod_base = OTHER; note = Nucleotide with phosphorothioate linkage
  modified_base 9: mod_base = OTHER; note = Nucleotide with phosphorothioate linkage
  modified_base 10: mod_base = OTHER; note = Nucleotide with phosphorothioate linkage
  modified_base 11: mod_base = OTHER; note = 8-amino-guanosine with phosphorothioate linkage
  modified_base 12: mod_base = OTHER; note = 5-methylcytosine with phosphorothioate linkage
  modified_base 13: mod_base = OTHER; note = Nucleotide with phosphorothioate linkage
  modified_base 14: mod_base = OTHER; note = Nucleotide with phosphorothioate linkage
  modified_base 15: mod_base = OTHER; note = Nucleotide with phosphorothioate linkage
  modified_base 16: mod_base = OTHER; note = 2'-O-methoxyethyl modified nucleotide with phosphorothioate linkage
  modified_base 17: mod_base = OTHER; note = 2'-O-methoxyethyl modified thymine with phosphorothioate linkage
  modified_base 18: mod_base = OTHER; note = 2'-O-methoxyethyl modified nucleotide with phosphorothioate linkage
  modified_base 19: mod_base = OTHER; note = 2'-O-methoxyethyl 5-methylcytosine with phosphorothioate linkage
  modified_base 20: mod_base = OTHER; note = 2'-O-methoxyethyl modified nucleotide
  misc_feature 1..5: note = RNA
  misc_feature 6..15: note = DNA
  misc_feature 16..20: note = RNA
cagaggtgaagcgaagtgca

SEQ ID NO: 459 - DNA, 20 bp, synthetic construct
  source 1..20: mol_type = other DNA
  modified_base 1: mod_base = OTHER; note = 2'-O-methoxyethyl 5-methylcytosine with phosphorothioate linkage
  modified_base 2: mod_base = OTHER; note = 2'-O-cyclopropyl modified nucleotide with phosphorothioate linkage
  modified_base 3: mod_base = OTHER; note = 2'-O-methoxyethyl modified nucleotide with phosphorothioate linkage
  modified_base 4: mod_base = OTHER; note = 2'-O-methoxyethyl modified nucleotide with phosphorothioate linkage
  modified_base 5: mod_base = OTHER; note = 2'-O-methoxyethyl modified nucleotide with phosphorothioate linkage
  modified_base 6: mod_base = OTHER; note = Nucleotide with phosphorothioate linkage
  modified_base 7: mod_base = OTHER; note = Thymine with phosphorothioate linkage
  modified_base 8: mod_base = OTHER; note = Nucleotide with phosphorothioate linkage
  modified_base 9: mod_base = OTHER; note = Nucleotide with phosphorothioate linkage
  modified_base 10: mod_base = OTHER; note = Nucleotide with phosphorothioate linkage
  modified_base 11: mod_base = OTHER; note = 8-amino-guanosine with phosphorothioate linkage
  modified_base 12: mod_base = OTHER; note = 5-methylcytosine with phosphorothioate linkage
  modified_base 13: mod_base = OTHER; note = Nucleotide with phosphorothioate linkage
  modified_base 14: mod_base = OTHER; note = Nucleotide with phosphorothioate linkage
  modified_base 15: mod_base = OTHER; note = Nucleotide with phosphorothioate linkage
  modified_base 16: mod_base = OTHER; note = 2'-O-methoxyethyl modified nucleotide with phosphorothioate linkage
  modified_base 17: mod_base = OTHER; note = 2'-O-methoxyethyl modified thymine with phosphorothioate linkage
  modified_base 18: mod_base = OTHER; note = 2'-O-methoxyethyl modified nucleotide with phosphorothioate linkage
  modified_base 19: mod_base = OTHER; note = 2'-O-methoxyethyl 5-methylcytosine with phosphorothioate linkage
  modified_base 20: mod_base = OTHER; note = 2'-O-cyclopropyl modified nucleotide
  misc_feature 1..5: note = RNA
  misc_feature 6..15: note = DNA
  misc_feature 16..20: note = RNA
cagaggtgaagcgaagtgca

SEQ ID NO: 460 - DNA, 20 bp, synthetic construct
  source 1..20: mol_type = other DNA
  modified_base 1: mod_base = OTHER; note = 2'-O-methoxyethyl 5-methylcytosine with phosphorothioate linkage
  modified_base 2: mod_base = OTHER; note = 2'-O-methoxyethyl modified nucleotide with phosphorothioate linkage
  modified_base 3: mod_base = OTHER; note = 2'-O-methoxyethyl modified nucleotide with phosphorothioate linkage
  modified_base 4: mod_base = OTHER; note = 2'-O-cyclopropyl modified nucleotide with phosphorothioate linkage
  modified_base 5: mod_base = OTHER; note = 2'-O-methoxyethyl modified nucleotide with phosphorothioate linkage
  modified_base 6: mod_base = OTHER; note = Nucleotide with phosphorothioate linkage
  modified_base 7: mod_base = OTHER; note = Thymine with phosphorothioate linkage
  modified_base 8: mod_base = OTHER; note = Nucleotide with phosphorothioate linkage
  modified_base 9: mod_base = OTHER; note = Nucleotide with phosphorothioate linkage
  modified_base 10: mod_base = OTHER; note = Nucleotide with phosphorothioate linkage
  modified_base 11: mod_base = OTHER; note = 8-amino-guanosine with phosphorothioate linkage
  modified_base 12: mod_base = OTHER; note = 5-methylcytosine with phosphorothioate linkage
  modified_base 13: mod_base = OTHER; note = Nucleotide with phosphorothioate linkage
  modified_base 14: mod_base = OTHER; note = Nucleotide with phosphorothioate linkage
  modified_base 15: mod_base = OTHER; note = Nucleotide with phosphorothioate linkage
  modified_base 16: mod_base = OTHER; note = 2'-O-methoxyethyl modified nucleotide with phosphorothioate linkage
  modified_base 17: mod_base = OTHER; note = 2'-O-methoxyethyl modified thymine with phosphorothioate linkage
  modified_base 18: mod_base = OTHER; note = 2'-O-methoxyethyl modified nucleotide with phosphorothioate linkage
  modified_base 19: mod_base = OTHER; note = 2'-O-methoxyethyl 5-methylcytosine with phosphorothioate linkage
  modified_base 20: mod_base = OTHER; note = 2'-O-cyclopropyl modified nucleotide
  misc_feature 1..5: note = RNA
  misc_feature 6..15: note = DNA
  misc_feature 16..20: note = RNA
cagaggtgaagcgaagtgca

SEQ ID NO: 461 - DNA, 20 bp, synthetic construct
  source 1..20: mol_type = other DNA
  modified_base 1: mod_base = OTHER; note = 2'-O-methoxyethyl 5-methylcytosine with phosphorothioate linkage
  modified_base 2: mod_base = OTHER; note = 2'-O-cyclopropyl modified nucleotide with phosphorothioate linkage
  modified_base 3: mod_base = OTHER; note = 2'-O-methoxyethyl modified nucleotide with phosphorothioate linkage
  modified_base 4: mod_base = OTHER; note = 2'-O-cyclopropyl modified nucleotide with phosphorothioate linkage
  modified_base 5: mod_base = OTHER; note = 2'-O-methoxyethyl modified nucleotide with phosphorothioate linkage
  modified_base 6: mod_base = OTHER; note = Nucleotide with phosphorothioate linkage
  modified_base 7: mod_base = OTHER; note = Thymine with phosphorothioate linkage
  modified_base 8: mod_base = OTHER; note = Nucleotide with phosphorothioate linkage
  modified_base 9: mod_base = OTHER; note = Nucleotide with phosphorothioate linkage
  modified_base 10: mod_base = OTHER; note = Nucleotide with phosphorothioate linkage
  modified_base 11: mod_base = OTHER; note = 8-amino-guanosine with phosphorothioate linkage
  modified_base 12: mod_base = OTHER; note = 5-methylcytosine with phosphorothioate linkage
  modified_base 13: mod_base = OTHER; note = Nucleotide with phosphorothioate linkage
  modified_base 14: mod_base = OTHER; note = Nucleotide with phosphorothioate linkage
  modified_base 15: mod_base = OTHER; note = Nucleotide with phosphorothioate linkage
  modified_base 16: mod_base = OTHER; note = 2'-O-methoxyethyl modified nucleotide with phosphorothioate linkage
  modified_base 17: mod_base = OTHER; note = 2'-O-methoxyethyl modified thymine with phosphorothioate linkage
  modified_base 18: mod_base = OTHER; note = 2'-O-methoxyethyl modified nucleotide with phosphorothioate linkage
  modified_base 19: mod_base = OTHER; note = 2'-O-methoxyethyl 5-methylcytosine with phosphorothioate linkage
  modified_base 20: mod_base = OTHER; note = 2'-O-cyclopropyl modified nucleotide
  misc_feature 1..5: note = RNA
  misc_feature 6..15: note = DNA
  misc_feature 16..20: note = RNA
cagaggtgaagcgaagtgca

SEQ ID NO: 462 - DNA, 20 bp, synthetic construct
  source 1..20: mol_type = other DNA
  modified_base 1: mod_base = OTHER; note = 2'-O-methoxyethyl 5-methylcytosine with phosphorothioate linkage
  modified_base 2: mod_base = OTHER; note = 2'-O-methoxyethyl modified nucleotide with phosphorothioate linkage
  modified_base 3: mod_base = OTHER; note = 2'-O-cyclopropyl modified nucleotide with phosphorothioate linkage
  modified_base 4: mod_base = OTHER; note = 2'-O-methoxyethyl modified nucleotide with phosphorothioate linkage
  modified_base 5: mod_base = OTHER; note = 2'-O-cyclopropyl modified nucleotide with phosphorothioate linkage
  modified_base 6: mod_base = OTHER; note = Nucleotide with phosphorothioate linkage
  modified_base 7: mod_base = OTHER; note = Thymine with phosphorothioate linkage
  modified_base 8: mod_base = OTHER; note = Nucleotide with phosphorothioate linkage
  modified_base 9: mod_base = OTHER; note = Nucleotide with phosphorothioate linkage
  modified_base 10: mod_base = OTHER; note = Nucleotide with phosphorothioate linkage
  modified_base 11: mod_base = OTHER; note = 8-amino-guanosine with phosphorothioate linkage
  modified_base 12: mod_base = OTHER; note = 5-methylcytosine with phosphorothioate linkage
  modified_base 13: mod_base = OTHER; note = Nucleotide with phosphorothioate linkage
  modified_base 14: mod_base = OTHER; note = Nucleotide with phosphorothioate linkage
  modified_base 15: mod_base = OTHER; note = Nucleotide with phosphorothioate linkage
  modified_base 16: mod_base = OTHER; note = 2'-O-methoxyethyl modified nucleotide with phosphorothioate linkage
  modified_base 17: mod_base = OTHER; note = 2'-O-methoxyethyl modified thymine with phosphorothioate linkage
  modified_base 18: mod_base = OTHER; note = 2'-O-methoxyethyl modified nucleotide with phosphorothioate linkage
  modified_base 19: mod_base = OTHER; note = 2'-O-methoxyethyl 5-methylcytosine with phosphorothioate linkage
  modified_base 20: mod_base = OTHER; note = 2'-O-methoxyethyl modified nucleotide
  misc_feature 1..5: note = RNA
  misc_feature 6..15: note = DNA
  misc_feature 16..20: note = RNA
cagaggtgaagcgaagtgca

SEQ ID NO: 463 - DNA, 20 bp, synthetic construct
  source 1..20: mol_type = other DNA
  modified_base 1: mod_base = OTHER; note = 2'-O-methoxyethyl 5-methylcytosine with phosphorothioate linkage
  modified_base 2: mod_base = OTHER; note = 2'-O-methoxyethyl modified nucleotide with phosphorothioate linkage
  modified_base 3: mod_base = OTHER; note = 2'-O-methoxyethyl modified nucleotide with phosphorothioate linkage
  modified_base 4: mod_base = OTHER; note = 2'-O-methoxyethyl modified nucleotide with phosphorothioate linkage
  modified_base 5: mod_base = OTHER; note = 2'-O-methoxyethyl modified nucleotide with phosphorothioate linkage
  modified_base 6: mod_base = OTHER; note = Nucleotide with phosphorothioate linkage
  modified_base 7: mod_base = OTHER; note = Thymine with phosphorothioate linkage
  modified_base 8: mod_base = OTHER; note = Nucleotide with phosphorothioate linkage
  modified_base 9: mod_base = OTHER; note = Nucleotide with phosphorothioate linkage
  modified_base 10: mod_base = OTHER; note = Nucleotide with phosphorothioate linkage
  modified_base 11: mod_base = OTHER; note = 8-amino-guanosine with phosphorothioate linkage
  modified_base 12: mod_base = OTHER; note = 5-methylcytosine with phosphorothioate linkage
  modified_base 13: mod_base = OTHER; note = Nucleotide with phosphorothioate linkage
  modified_base 14: mod_base = OTHER; note = Nucleotide with phosphorothioate linkage
  modified_base 15: mod_base = OTHER; note = Nucleotide with phosphorothioate linkage
  modified_base 16: mod_base = OTHER; note = 2'-O-cyclopropyl modified nucleotide with phosphorothioate linkage
  modified_base 17: mod_base = OTHER; note = 2'-O-methoxyethyl modified thymine with phosphorothioate linkage
  modified_base 18: mod_base = OTHER; note = 2'-O-cyclopropyl modified nucleotide with phosphorothioate linkage
  modified_base 19: mod_base = OTHER; note = 2'-O-methoxyethyl 5-methylcytosine with phosphorothioate linkage
  modified_base 20: mod_base = OTHER; note = 2'-O-methoxyethyl modified nucleotide
  misc_feature 1..5: note = RNA
  misc_feature 6..15: note = DNA
  misc_feature 16..20: note = RNA
cagaggtgaagcgaagtgca

SEQ ID NO: 464 - DNA, 20 bp, synthetic construct
  source 1..20: mol_type = other DNA
  modified_base 1: mod_base = OTHER; note = 2'-O-methoxyethyl 5-methylcytosine with phosphorothioate linkage
  modified_base 2: mod_base = OTHER; note = 2'-O-methoxyethyl modified nucleotide with phosphorothioate linkage
  modified_base 3: mod_base = OTHER; note = 2'-O-cyclopropyl modified nucleotide with phosphorothioate linkage
  modified_base 4: mod_base = OTHER; note = 2'-O-methoxyethyl modified nucleotide with phosphorothioate linkage
  modified_base 5: mod_base = OTHER; note = 2'-O-methoxyethyl modified nucleotide with phosphorothioate linkage
  modified_base 6: mod_base = OTHER; note = Nucleotide with phosphorothioate linkage
  modified_base 7: mod_base = OTHER; note = Thymine with phosphorothioate linkage
  modified_base 8: mod_base = OTHER; note = Nucleotide with phosphorothioate linkage
  modified_base 9: mod_base = OTHER; note = Nucleotide with phosphorothioate linkage
  modified_base 10: mod_base = OTHER; note = Nucleotide with phosphorothioate linkage
  modified_base 11: mod_base = OTHER; note = 8-amino-guanosine with phosphorothioate linkage
  modified_base 12: mod_base = OTHER; note = 5-methylcytosine with phosphorothioate linkage
  modified_base 13: mod_base = OTHER; note = Nucleotide with phosphorothioate linkage
  modified_base 14: mod_base = OTHER; note = Nucleotide with phosphorothioate linkage
  modified_base 15: mod_base = OTHER; note = Nucleotide with phosphorothioate linkage
  modified_base 16: mod_base = OTHER; note = 2'-O-cyclopropyl modified nucleotide with phosphorothioate linkage
  modified_base 17: mod_base = OTHER; note = 2'-O-methoxyethyl modified thymine with phosphorothioate linkage
  modified_base 18: mod_base = OTHER; note = 2'-O-methoxyethyl modified nucleotide with phosphorothioate linkage
  modified_base 19: mod_base = OTHER; note = 2'-O-methoxyethyl 5-methylcytosine with phosphorothioate linkage
  modified_base 20: mod_base = OTHER; note = 2'-O-methoxyethyl modified nucleotide
  misc_feature 1..5: note = RNA
  misc_feature 6..15: note = DNA
  misc_feature 16..20: note = RNA
cagaggtgaagcgaagtgca

SEQ ID NO: 465 - DNA, 20 bp, synthetic construct
  source 1..20: mol_type = other DNA
  modified_base 1: mod_base = OTHER; note = 2'-O-methoxyethyl 5-methylcytosine with phosphorothioate linkage
  modified_base 2: mod_base = OTHER; note = 2'-O-methoxyethyl modified nucleotide with phosphorothioate linkage
  modified_base 3: mod_base = OTHER; note = 2'-O-cyclopropyl modified nucleotide with phosphorothioate linkage
  modified_base 4: mod_base = OTHER; note = 2'-O-methoxyethyl modified nucleotide with phosphorothioate linkage
  modified_base 5: mod_base = OTHER; note = 2'-O-methoxyethyl modified nucleotide with phosphorothioate linkage
  modified_base 6: mod_base = OTHER; note = Nucleotide with phosphorothioate linkage
  modified_base 7: mod_base = OTHER; note = Thymine with phosphorothioate linkage
  modified_base 8: mod_base = OTHER; note = Nucleotide with phosphorothioate linkage
  modified_base 9: mod_base = OTHER; note = Nucleotide with phosphorothioate linkage
  modified_base 10: mod_base = OTHER; note = Nucleotide with phosphorothioate linkage
  modified_base 11: mod_base = OTHER; note = 8-amino-guanosine with phosphorothioate linkage
  modified_base 12: mod_base = OTHER; note = 5-methylcytosine with phosphorothioate linkage
  modified_base 13: mod_base = OTHER; note = Nucleotide with phosphorothioate linkage
  modified_base 14: mod_base = OTHER; note = Nucleotide with phosphorothioate linkage
  modified_base 15: mod_base = OTHER; note = Nucleotide with phosphorothioate linkage
  modified_base 16: mod_base = OTHER; note = 2'-O-methoxyethyl modified nucleotide with phosphorothioate linkage
  modified_base 17: mod_base = OTHER; note = 2'-O-methoxyethyl modified thymine with phosphorothioate linkage
  modified_base 18: mod_base = OTHER; note = 2'-O-cyclopropyl modified nucleotide with phosphorothioate linkage
  modified_base 19: mod_base = OTHER; note = 2'-O-methoxyethyl 5-methylcytosine with phosphorothioate linkage
  modified_base 20: mod_base = OTHER; note = 2'-O-methoxyethyl modified nucleotide
  misc_feature 1..5: note = RNA
  misc_feature 6..15: note = DNA
  misc_feature 16..20: note = RNA
cagaggtgaagcgaagtgca

SEQ ID NO: 466 - DNA, 20 bp, synthetic construct
  source 1..20: mol_type = other DNA
  modified_base 1: mod_base = OTHER; note = 2'-O-methoxyethyl 5-methylcytosine with phosphorothioate linkage
  modified_base 2: mod_base = OTHER; note = 2'-O-methoxyethyl modified nucleotide with phosphorothioate linkage
  modified_base 3: mod_base = OTHER; note = 2'-O-methoxyethyl modified nucleotide with phosphorothioate linkage
  modified_base 4: mod_base = OTHER; note = 2'-O-methoxyethyl modified nucleotide with phosphorothioate linkage
  modified_base 5: mod_base = OTHER; note = 2'-O-cyclopropyl modified nucleotide with phosphorothioate linkage
  modified_base 6: mod_base = OTHER; note = Nucleotide with phosphorothioate linkage
  modified_base 7: mod_base = OTHER; note = Thymine with phosphorothioate linkage
  modified_base 8: mod_base = OTHER; note = Nucleotide with phosphorothioate linkage
  modified_base 9: mod_base = OTHER; note = Nucleotide with phosphorothioate linkage
  modified_base 10: mod_base = OTHER; note = Nucleotide with phosphorothioate linkage
  modified_base 11: mod_base = OTHER; note = 8-amino-guanosine with phosphorothioate linkage
  modified_base 12: mod_base = OTHER; note = 5-methylcytosine with phosphorothioate linkage
  modified_base 13: mod_base = OTHER; note = Nucleotide with phosphorothioate linkage
  modified_base 14: mod_base = OTHER; note = Nucleotide with phosphorothioate linkage
  modified_base 15: mod_base = OTHER; note = Nucleotide with phosphorothioate linkage
  modified_base 16: mod_base = OTHER; note = 2'-O-cyclopropyl modified nucleotide with phosphorothioate linkage
  modified_base 17: mod_base = OTHER; note = 2'-O-methoxyethyl modified thymine with phosphorothioate linkage
  modified_base 18: mod_base = OTHER; note = 2'-O-methoxyethyl modified nucleotide with phosphorothioate linkage
  modified_base 19: mod_base = OTHER; note = 2'-O-methoxyethyl 5-methylcytosine with phosphorothioate linkage
  modified_base 20: mod_base = OTHER; note = 2'-O-methoxyethyl modified nucleotide
  misc_feature 1..5: note = RNA
  misc_feature 6..15: note = DNA
  misc_feature 16..20: note = RNA
cagaggtgaagcgaagtgca

SEQ ID NO: 467 - DNA, 20 bp, synthetic construct
  source 1..20: mol_type = other DNA
  modified_base 1: mod_base = OTHER; note = 2'-O-methoxyethyl 5-methylcytosine with phosphorothioate linkage
  modified_base 2: mod_base = OTHER; note = 2'-O-methoxyethyl modified nucleotide with phosphorothioate linkage
  modified_base 3: mod_base = OTHER; note = 2'-O-methoxyethyl modified nucleotide with phosphorothioate linkage
  modified_base 4: mod_base = OTHER; note = 2'-O-methoxyethyl modified nucleotide with phosphorothioate linkage
  modified_base 5: mod_base = OTHER; note = 2'-O-cyclopropyl modified nucleotide with phosphorothioate linkage
  modified_base 6: mod_base = OTHER; note = Nucleotide with phosphorothioate linkage
  modified_base 7: mod_base = OTHER; note = Thymine with phosphorothioate linkage
  modified_base 8: mod_base = OTHER; note = Nucleotide with phosphorothioate linkage
  modified_base 9: mod_base = OTHER; note = Nucleotide with phosphorothioate linkage
  modified_base 10: mod_base = OTHER; note = Nucleotide with phosphorothioate linkage
  modified_base 11: mod_base = OTHER; note = 8-amino-guanosine with phosphorothioate linkage
  modified_base 12: mod_base = OTHER; note = 5-methylcytosine with phosphorothioate linkage
  modified_base 13: mod_base = OTHER; note = Nucleotide with phosphorothioate linkage
  modified_base 14: mod_base = OTHER; note = Nucleotide with phosphorothioate linkage
  modified_base 15: mod_base = OTHER; note = Nucleotide with phosphorothioate linkage
  modified_base 16: mod_base = OTHER; note = 2'-O-methoxyethyl modified nucleotide with phosphorothioate linkage
  modified_base 17: mod_base = OTHER; note = 2'-O-methoxyethyl modified thymine with phosphorothioate linkage
  modified_base 18: mod_base = OTHER; note = 2'-O-cyclopropyl modified nucleotide with phosphorothioate linkage
  modified_base 19: mod_base = OTHER; note = 2'-O-methoxyethyl 5-methylcytosine with phosphorothioate linkage
  modified_base 20: mod_base = OTHER; note = 2'-O-methoxyethyl modified nucleotide
  misc_feature 1..5: note = RNA
  misc_feature 6..15: note = DNA
  misc_feature 16..20: note = RNA
cagaggtgaagcgaagtgca

SEQ ID NO: 468 - DNA, 20 bp, synthetic construct
  source 1..20: mol_type = other DNA
  modified_base 1: mod_base = OTHER; note = 2'-O-methoxyethyl 5-methylcytosine with phosphorothioate linkage
  modified_base 2: mod_base = OTHER; note = 2'-O-methoxyethyl modified nucleotide with phosphorothioate linkage
  modified_base 3: mod_base = OTHER; note = 2'-O-cyclopropyl modified nucleotide with phosphorothioate linkage
  modified_base 4: mod_base = OTHER; note = 2'-O-methoxyethyl modified nucleotide with phosphorothioate linkage
  modified_base 5: mod_base = OTHER; note = 2'-O-cyclopropyl modified nucleotide with phosphorothioate linkage
  modified_base 6: mod_base = OTHER; note = Nucleotide with phosphorothioate linkage
  modified_base 7: mod_base = OTHER; note = Thymine with phosphorothioate linkage
  modified_base 8: mod_base = OTHER; note = Nucleotide with phosphorothioate linkage
  modified_base 9: mod_base = OTHER; note = Nucleotide with phosphorothioate linkage
  modified_base 10: mod_base = OTHER; note = Nucleotide with phosphorothioate linkage
  modified_base 11: mod_base = OTHER; note = 8-amino-guanosine with phosphorothioate linkage
  modified_base 12: mod_base = OTHER; note = 5-methylcytosine with phosphorothioate linkage
  modified_base 13: mod_base = OTHER; note = Nucleotide with phosphorothioate linkage
  modified_base 14: mod_base = OTHER; note = Nucleotide with phosphorothioate linkage
  modified_base 15: mod_base = OTHER; note = Nucleotide with phosphorothioate linkage
  modified_base 16: mod_base = OTHER; note = 2'-O-cyclopropyl modified nucleotide with phosphorothioate linkage
  modified_base 17: mod_base = OTHER; note = 2'-O-methoxyethyl modified thymine with phosphorothioate linkage
  modified_base 18: mod_base = OTHER; note = 2'-O-methoxyethyl modified nucleotide with phosphorothioate linkage
  modified_base 19: mod_base = OTHER; note = 2'-O-methoxyethyl 5-methylcytosine with phosphorothioate linkage
  modified_base 20: mod_base = OTHER; note = 2'-O-methoxyethyl modified nucleotide
  misc_feature 1..5: note = RNA
  misc_feature 6..15: note = DNA
  misc_feature 16..20: note = RNA
cagaggtgaagcgaagtgca

SEQ ID NO: 469 - DNA, 20 bp, synthetic construct
  source 1..20: mol_type = other DNA
  modified_base 1: mod_base = OTHER; note = 2'-O-methoxyethyl 5-methylcytosine with phosphorothioate linkage
  modified_base 2: mod_base = OTHER; note = 2'-O-methoxyethyl modified nucleotide with phosphorothioate linkage
  modified_base 3: mod_base = OTHER; note = 2'-O-cyclopropyl modified nucleotide with phosphorothioate linkage
  modified_base 4: mod_base = OTHER; note = 2'-O-methoxyethyl modified nucleotide with phosphorothioate linkage
  modified_base 5: mod_base = OTHER; note = 2'-O-cyclopropyl modified nucleotide with phosphorothioate linkage
  modified_base 6: mod_base = OTHER; note = Nucleotide with phosphorothioate linkage
  modified_base 7: mod_base = OTHER; note = Thymine with phosphorothioate linkage
  modified_base 8: mod_base = OTHER; note = Nucleotide with phosphorothioate linkage
  modified_base 9: mod_base = OTHER; note = Nucleotide with phosphorothioate linkage
  modified_base 10: mod_base = OTHER; note = Nucleotide with phosphorothioate linkage
  modified_base 11: mod_base = OTHER; note = 8-amino-guanosine with phosphorothioate linkage
  modified_base 12: mod_base = OTHER; note = 5-methylcytosine with phosphorothioate linkage
  modified_base 13: mod_base = OTHER; note = Nucleotide with phosphorothioate linkage
  modified_base 14: mod_base = OTHER; note = Nucleotide with phosphorothioate linkage
  modified_base 15: mod_base = OTHER; note = Nucleotide with phosphorothioate linkage
  modified_base 16: mod_base = OTHER; note = 2'-O-methoxyethyl modified nucleotide with phosphorothioate linkage
  modified_base 17: mod_base = OTHER; note = 2'-O-methoxyethyl modified thymine with phosphorothioate linkage
  modified_base 18: mod_base = OTHER; note = 2'-O-cyclopropyl modified nucleotide with phosphorothioate linkage
  modified_base 19: mod_base = OTHER; note = 2'-O-methoxyethyl 5-methylcytosine with phosphorothioate linkage
  modified_base 20: mod_base = OTHER; note = 2'-O-methoxyethyl modified nucleotide
  misc_feature 1..5: note = RNA
  misc_feature 6..15: note = DNA
  misc_feature 16..20: note = RNA
cagaggtgaagcgaagtgca

SEQ ID NO: 470 - DNA, 20 bp, synthetic construct
  source 1..20: mol_type = other DNA
  modified_base 1: mod_base = OTHER; note = 2'-O-methoxyethyl 5-methylcytosine with phosphorothioate linkage
  modified_base 2: mod_base = OTHER; note = 2'-O-methoxyethyl modified nucleotide with phosphorothioate linkage
  modified_base 3: mod_base = OTHER; note = 2'-O-cyclopropyl modified nucleotide with phosphorothioate linkage
  modified_base 4: mod_base = OTHER; note = 2'-O-methoxyethyl modified nucleotide with phosphorothioate linkage
  modified_base 5: mod_base = OTHER; note = 2'-O-methoxyethyl modified nucleotide with phosphorothioate linkage
  modified_base 6: mod_base = OTHER; note = Nucleotide with phosphorothioate linkage
  modified_base 7: mod_base = OTHER; note = Thymine with phosphorothioate linkage
  modified_base 8: mod_base = OTHER; note = Nucleotide with phosphorothioate linkage
  modified_base 9: mod_base = OTHER; note = Nucleotide with phosphorothioate linkage
  modified_base 10: mod_base = OTHER; note = Nucleotide with phosphorothioate linkage
  modified_base 11: mod_base = OTHER; note = 8-amino-guanosine with phosphorothioate linkage
  modified_base 12: mod_base = OTHER; note = 5-methylcytosine with phosphorothioate linkage
  modified_base 13: mod_base = OTHER; note = Nucleotide with phosphorothioate linkage
  modified_base 14: mod_base = OTHER; note = Nucleotide with phosphorothioate linkage
  modified_base 15: mod_base = OTHER; note = Nucleotide with phosphorothioate linkage
  modified_base 16: mod_base = OTHER; note = 2'-O-cyclopropyl modified nucleotide with phosphorothioate linkage
  modified_base 17: mod_base = OTHER; note = 2'-O-methoxyethyl modified thymine with phosphorothioate linkage
  modified_base 18: mod_base = OTHER; note = 2'-O-cyclopropyl modified nucleotide with phosphorothioate linkage
  modified_base 19: mod_base = OTHER; note = 2'-O-methoxyethyl 5-methylcytosine with phosphorothioate linkage
  modified_base 20: mod_base = OTHER; note = 2'-O-methoxyethyl modified nucleotide
  misc_feature 1..5: note = RNA
  misc_feature 6..15: note = DNA
  misc_feature 16..20: note = RNA
cagaggtgaagcgaagtgca

SEQ ID NO: 471 - DNA, 20 bp, synthetic construct
  source 1..20: mol_type = other DNA
  modified_base 1: mod_base = OTHER; note = 2'-O-methoxyethyl 5-methylcytosine with phosphorothioate linkage
  modified_base 2: mod_base = OTHER; note = 2'-O-methoxyethyl modified nucleotide with phosphorothioate linkage
  modified_base 3: mod_base = OTHER; note = 2'-O-methoxyethyl modified nucleotide with phosphorothioate linkage
  modified_base 4: mod_base = OTHER; note = 2'-O-methoxyethyl modified nucleotide with phosphorothioate linkage
  modified_base 5: mod_base = OTHER; note = 2'-O-cyclopropyl modified nucleotide with phosphorothioate linkage
  modified_base 6: mod_base = OTHER; note = Nucleotide with phosphorothioate linkage
  modified_base 7: mod_base = OTHER; note = Thymine with phosphorothioate linkage
  modified_base 8: mod_base = OTHER; note = Nucleotide with phosphorothioate linkage
  modified_base 9: mod_base = OTHER; note = Nucleotide with phosphorothioate linkage
  modified_base 10: mod_base = OTHER; note = Nucleotide with phosphorothioate linkage
  modified_base 11: mod_base = OTHER; note = 8-amino-guanosine with phosphorothioate linkage
  modified_base 12: mod_base = OTHER; note = 5-methylcytosine with phosphorothioate linkage
  modified_base 13: mod_base = OTHER; note = Nucleotide with phosphorothioate linkage
  modified_base 14: mod_base = OTHER; note = Nucleotide with phosphorothioate linkage
  modified_base 15: mod_base = OTHER; note = Nucleotide with phosphorothioate linkage
  modified_base 16: mod_base = OTHER; note = 2'-O-cyclopropyl modified nucleotide with phosphorothioate linkage
  modified_base 17: mod_base = OTHER; note = 2'-O-methoxyethyl modified thymine with phosphorothioate linkage
  modified_base 18: mod_base = OTHER; note = 2'-O-cyclopropyl modified nucleotide with phosphorothioate linkage
  modified_base 19: mod_base = OTHER; note = 2'-O-methoxyethyl 5-methylcytosine with phosphorothioate linkage
  modified_base 20: mod_base = OTHER; note = 2'-O-methoxyethyl modified nucleotide
  misc_feature 1..5: note = RNA
  misc_feature 6..15: note = DNA
  misc_feature 16..20: note = RNA
cagaggtgaagcgaagtgca

SEQ ID NO: 472 - DNA, 20 bp, synthetic construct
  source 1..20: mol_type = other DNA
  modified_base 1: mod_base = OTHER; note = 2'-O-methoxyethyl 5-methylcytosine with phosphorothioate linkage
  modified_base 2: mod_base = OTHER; note = 2'-O-cyclopropyl modified nucleotide with phosphorothioate linkage
  modified_base 3: mod_base = OTHER; note = 2'-O-cyclopropyl modified nucleotide with phosphorothioate linkage
  modified_base 4: mod_base = OTHER; note = 2'-O-methoxyethyl modified nucleotide with phosphorothioate linkage
  modified_base 5: mod_base = OTHER; note = 2'-O-cyclopropyl modified nucleotide with phosphorothioate linkage
  modified_base 6: mod_base = OTHER; note = Nucleotide with phosphorothioate linkage
  modified_base 7: mod_base = OTHER; note = Thymine with phosphorothioate linkage
  modified_base 8: mod_base = OTHER; note = Nucleotide with phosphorothioate linkage
  modified_base 9: mod_base = OTHER; note = Nucleotide with phosphorothioate linkage
  modified_base 10: mod_base = OTHER; note = Nucleotide with phosphorothioate linkage
  modified_base 11: mod_base = OTHER; note = 8-amino-guanosine with phosphorothioate linkage
  modified_base 12: mod_base = OTHER; note = 5-methylcytosine with phosphorothioate linkage
  modified_base 13: mod_base = OTHER; note = Nucleotide with phosphorothioate linkage
  modified_base 14: mod_base = OTHER; note = Nucleotide with phosphorothioate linkage
  modified_base 15: mod_base = OTHER; note = Nucleotide with phosphorothioate linkage
  modified_base 16: mod_base = OTHER; note = 2'-O-methoxyethyl modified nucleotide with phosphorothioate linkage
  modified_base 17: mod_base = OTHER; note = 2'-O-methoxyethyl modified thymine with phosphorothioate linkage
  modified_base 18: mod_base = OTHER; note = 2'-O-methoxyethyl modified nucleotide with phosphorothioate linkage
  modified_base 19: mod_base = OTHER; note = 2'-O-methoxyethyl 5-methylcytosine with phosphorothioate linkage
  modified_base 20: mod_base = OTHER; note = 2'-O-methoxyethyl modified nucleotide
  misc_feature 1..5: note = RNA
  misc_feature 6..15: note = DNA
  misc_feature 16..20: note = RNA
cagaggtgaagcgaagtgca

SEQ ID NO: 473 - DNA, 20 bp, synthetic construct
  source 1..20: mol_type = other DNA
  modified_base 1: mod_base = OTHER; note = 2'-O-methoxyethyl 5-methylcytosine with phosphorothioate linkage
  modified_base 2: mod_base = OTHER; note = 2'-O-cyclopropyl modified nucleotide with phosphorothioate linkage
  modified_base 3: mod_base = OTHER; note = 2'-O-methoxyethyl modified nucleotide with phosphorothioate linkage
  modified_base 4: mod_base = OTHER; note = 2'-O-cyclopropyl modified nucleotide with phosphorothioate linkage
  modified_base 5: mod_base = OTHER; note = 2'-O-cyclopropyl modified nucleotide with phosphorothioate linkage
  modified_base 6: mod_base = OTHER; note = Nucleotide with phosphorothioate linkage
  modified_base 7: mod_base = OTHER; note = Thymine with phosphorothioate linkage
  modified_base 8: mod_base = OTHER; note = Nucleotide with phosphorothioate linkage
  modified_base 9: mod_base = OTHER; note = Nucleotide with phosphorothioate linkage
  modified_base 10: mod_base = OTHER; note = Nucleotide with phosphorothioate linkage
  modified_base 11: mod_base = OTHER; note = 8-amino-guanosine with phosphorothioate linkage
  modified_base 12: mod_base = OTHER; note = 5-methylcytosine with phosphorothioate linkage
  modified_base 13: mod_base = OTHER; note = Nucleotide with phosphorothioate linkage
  modified_base 14: mod_base = OTHER; note = Nucleotide with phosphorothioate linkage
  modified_base 15: mod_base = OTHER; note = Nucleotide with phosphorothioate linkage
  modified_base 16: mod_base = OTHER; note = 2'-O-methoxyethyl modified nucleotide with phosphorothioate linkage
  modified_base 17: mod_base = OTHER; note = 2'-O-methoxyethyl modified thymine with phosphorothioate linkage
  modified_base 18: mod_base = OTHER; note = 2'-O-methoxyethyl modified nucleotide with phosphorothioate linkage
  modified_base 19: mod_base = OTHER; note = 2'-O-methoxyethyl 5-methylcytosine with phosphorothioate linkage
  modified_base 20: mod_base = OTHER; note = 2'-O-methoxyethyl modified nucleotide
  misc_feature 1..5: note = RNA
  misc_feature 6..15: note = DNA
  misc_feature 16..20: note = RNA
cagaggtgaagcgaagtgca

SEQ ID NO: 474 - DNA, 20 bp, synthetic construct
  source 1..20: mol_type = other DNA
  modified_base 1: mod_base = OTHER; note = 2'-O-methoxyethyl 5-methylcytosine with phosphorothioate linkage
  modified_base 2: mod_base = OTHER; note = 2'-O-methoxyethyl modified nucleotide with phosphorothioate linkage
  modified_base 3: mod_base = OTHER; note = 2'-O-methoxyethyl modified nucleotide with phosphorothioate linkage
  modified_base 4: mod_base = OTHER; note = 2'-O-methoxyethyl modified nucleotide with phosphorothioate linkage
  modified_base 5: mod_base = OTHER; note = 2'-O-methoxyethyl modified nucleotide with phosphorothioate linkage
  modified_base 6: mod_base = OTHER; note = Nucleotide with phosphorothioate linkage
  modified_base 7: mod_base = OTHER; note = Thymine with phosphorothioate linkage
  modified_base 8: mod_base = OTHER; note = Nucleotide with phosphorothioate linkage
  modified_base 9: mod_base = OTHER; note = Nucleotide with phosphorothioate linkage
  modified_base 10: mod_base = OTHER; note = Nucleotide with phosphorothioate linkage
  modified_base 11: mod_base = OTHER; note = 8-amino-guanosine with phosphorothioate linkage
  modified_base 12: mod_base = OTHER; note = 5-methylcytosine with phosphorothioate linkage
  modified_base 13: mod_base = OTHER; note = Nucleotide with phosphorothioate linkage
  modified_base 14: mod_base = OTHER; note = Nucleotide with phosphorothioate linkage
  modified_base 15: mod_base = OTHER; note = Nucleotide with phosphorothioate linkage
  modified_base 16: mod_base = OTHER; note = 2'-O-cyclopropyl modified nucleotide with phosphorothioate linkage
  modified_base 17: mod_base = OTHER; note = 2'-O-methoxyethyl modified thymine with phosphorothioate linkage
  modified_base 18: mod_base = OTHER; note = 2'-O-cyclopropyl modified nucleotide with phosphorothioate linkage
  modified_base 19: mod_base = OTHER; note = 2'-O-methoxyethyl 5-methylcytosine with phosphorothioate linkage
  modified_base 20: mod_base = OTHER; note = 2'-O-cyclopropyl modified nucleotide
  misc_feature 1..5: note = RNA
  misc_feature 6..15: note = DNA
  misc_feature 16..20: note = RNA
cagaggtgaagcgaagtgca

SEQ ID NO: 475 - DNA, 20 bp, synthetic construct
  source 1..20: mol_type = other DNA
  modified_base 1: mod_base = OTHER; note = 2'-O-methoxyethyl 5-methylcytosine with phosphorothioate linkage
  modified_base 2: mod_base = OTHER; note = 2'-O-methoxyethyl modified nucleotide with phosphorothioate linkage
  modified_base 3: mod_base = OTHER; note = 2'-O-methoxyethyl modified nucleotide with phosphorothioate linkage
  modified_base 4: mod_base = OTHER; note = 2'-O-methoxyethyl modified nucleotide with phosphorothioate linkage
  modified_base 5: mod_base = OTHER; note = 2'-O-methoxyethyl modified nucleotide with phosphorothioate linkage
  modified_base 6: mod_base = OTHER; note = Nucleotide with phosphorothioate linkage
  modified_base 7: mod_base = OTHER; note = Thymine with phosphorothioate linkage
  modified_base 8: mod_base = OTHER; note = Nucleotide with phosphorothioate linkage
  modified_base 9: mod_base = OTHER; note = Nucleotide with phosphorothioate linkage
  modified_base 10: mod_base = OTHER; note = Nucleotide with phosphorothioate linkage
  modified_base 11: mod_base = OTHER; note = 8-amino-guanosine with phosphorothioate linkage
  modified_base 12: mod_base = OTHER; note = 5-methylcytosine with phosphorothioate linkage
  modified_base 13: mod_base = OTHER; note = Nucleotide with phosphorothioate linkage
  modified_base 14: mod_base = OTHER; note = Nucleotide with phosphorothioate linkage
  modified_base 15: mod_base = OTHER; note = Nucleotide with phosphorothioate linkage
  modified_base 16: mod_base = OTHER; note = 2'-O-cyclopropyl modified nucleotide with phosphorothioate linkage
  modified_base 17: mod_base = OTHER; note = 2'-O-cyclopropyl modified thymine with phosphorothioate linkage
  modified_base 18: mod_base = OTHER; note = 2'-O-methoxyethyl modified nucleotide with phosphorothioate linkage
  modified_base 19: mod_base = OTHER; note = 2'-O-methoxyethyl 5-methylcytosine with phosphorothioate linkage
  modified_base 20: mod_base = OTHER; note = 2'-O-cyclopropyl modified nucleotide
  misc_feature 1..5: note = RNA
  misc_feature 6..15: note = DNA
  misc_feature 16..20: note = RNA
cagaggtgaagcgaagtgca

SEQ ID NO: 476 - DNA, 20 bp, synthetic construct
  source 1..20: mol_type = other DNA
  modified_base 1: mod_base = OTHER; note = 2'-O-methoxyethyl 5-methylcytosine with phosphorothioate linkage
  modified_base 2: mod_base = OTHER; note = 2'-O-methoxyethyl modified nucleotide with phosphorothioate linkage
  modified_base 3: mod_base = OTHER; note = 2'-O-methoxyethyl modified nucleotide with phosphorothioate linkage
  modified_base 4: mod_base = OTHER; note = 2'-O-methoxyethyl modified nucleotide with phosphorothioate linkage
  modified_base 5: mod_base = OTHER; note = 2'-O-methoxyethyl modified nucleotide with phosphorothioate linkage
  modified_base 6: mod_base = OTHER; note = Nucleotide with phosphorothioate linkage
  modified_base 7: mod_base = OTHER; note = Thymine with phosphorothioate linkage
  modified_base 8: mod_base = OTHER; note = Nucleotide with phosphorothioate linkage
  modified_base 9: mod_base = OTHER; note = Nucleotide with phosphorothioate linkage
  modified_base 10: mod_base = OTHER; note = Nucleotide with phosphorothioate linkage
  modified_base 11: mod_base = OTHER; note = 8-amino-guanosine with phosphorothioate linkage
  modified_base 12: mod_base = OTHER; note = 5-methylcytosine with phosphorothioate linkage
  modified_base 13: mod_base = OTHER; note = Nucleotide with phosphorothioate linkage
  modified_base 14: mod_base = OTHER; note = Nucleotide with phosphorothioate linkage
  modified_base 15: mod_base = OTHER; note = Nucleotide with phosphorothioate linkage
  modified_base 16: mod_base = OTHER; note = 2'-O-cyclopropyl modified nucleotide with phosphorothioate linkage
  modified_base 17: mod_base = OTHER; note = 2'-O-methoxyethyl modified thymine with phosphorothioate linkage
  modified_base 18: mod_base = OTHER; note = 2'-O-methoxyethyl modified nucleotide with phosphorothioate linkage
  modified_base 19: mod_base = OTHER; note = 2'-O-cyclopropyl modified 5-methylcytosine with phosphorothioate linkage
  modified_base 20: mod_base = OTHER; note = 2'-O-cyclopropyl modified nucleotide
  misc_feature 1..5: note = RNA
  misc_feature 6..15: note = DNA
  misc_feature 16..20: note = RNA
cagaggtgaagcgaagtgca

SEQ ID NO: 477 - DNA, 20 bp, synthetic construct
  source 1..20: mol_type = other DNA
  modified_base 1: mod_base = OTHER; note = 2'-O-methoxyethyl 5-methylcytosine with phosphorothioate linkage
  modified_base 2: mod_base = OTHER; note = 2'-O-methoxyethyl modified nucleotide with phosphorothioate linkage
  modified_base 3: mod_base = OTHER; note = 2'-O-methoxyethyl modified nucleotide with phosphorothioate linkage
  modified_base 4: mod_base = OTHER; note = 2'-O-methoxyethyl modified nucleotide with phosphorothioate linkage
  modified_base 5: mod_base = OTHER; note = 2'-O-methoxyethyl modified nucleotide with phosphorothioate linkage
  modified_base 6: mod_base = OTHER; note = Nucleotide with phosphorothioate linkage
  modified_base 7: mod_base = OTHER; note = Thymine with phosphorothioate linkage
  modified_base 8: mod_base = OTHER; note = Nucleotide with phosphorothioate linkage
  modified_base 9: mod_base = OTHER; note = Nucleotide with phosphorothioate linkage
  modified_base 10: mod_base = OTHER; note = Nucleotide with phosphorothioate linkage
  modified_base 11: mod_base = OTHER; note = 8-amino-guanosine with phosphorothioate linkage
  modified_base 12: mod_base = OTHER; note = 5-methylcytosine with phosphorothioate linkage
  modified_base 13: mod_base = OTHER; note = Nucleotide with phosphorothioate linkage
  modified_base 14: mod_base = OTHER; note = Nucleotide with phosphorothioate linkage
  modified_base 15: mod_base = OTHER; note = Nucleotide with phosphorothioate linkage
  modified_base 16: mod_base = OTHER; note = 2'-O-cyclopropyl modified nucleotide with phosphorothioate linkage
  modified_base 17: mod_base = OTHER; note = 2'-O-methoxyethyl modified thymine with phosphorothioate linkage
  modified_base 18: mod_base = OTHER; note = 2'-O-cyclopropyl modified nucleotide with phosphorothioate linkage
  modified_base 19: mod_base = OTHER; note = 2'-O-cyclopropyl modified 5-methylcytosine with phosphorothioate linkage
  modified_base 20: mod_base = OTHER; note = 2'-O-methoxyethyl modified nucleotide
  misc_feature 1..5: note = RNA
  misc_feature 6..15: note = DNA
  misc_feature 16..20: note = RNA
cagaggtgaagcgaagtgca

SEQ ID NO: 478 - DNA, 20 bp, synthetic construct
  source 1..20: mol_type = other DNA
  modified_base 1: mod_base = OTHER; note = 2'-O-methoxyethyl 5-methylcytosine with phosphorothioate linkage
  modified_base 2: mod_base = OTHER; note = 2'-O-methoxyethyl modified nucleotide with phosphorothioate linkage
  modified_base 3: mod_base = OTHER; note = 2'-O-methoxyethyl modified nucleotide with phosphorothioate linkage
  modified_base 4: mod_base = OTHER; note = 2'-O-methoxyethyl modified nucleotide with phosphorothioate linkage
  modified_base 5: mod_base = OTHER; note = 2'-O-methoxyethyl modified nucleotide with phosphorothioate linkage
  modified_base 6: mod_base = OTHER; note = Nucleotide with phosphorothioate linkage
  modified_base 7: mod_base = OTHER; note = Thymine with phosphorothioate linkage
  modified_base 8: mod_base = OTHER; note = Nucleotide with phosphorothioate linkage
  modified_base 9: mod_base = OTHER; note = Nucleotide with phosphorothioate linkage
  modified_base 10: mod_base = OTHER; note = Nucleotide with phosphorothioate linkage
  modified_base 11: mod_base = OTHER; note = 8-amino-guanosine with phosphorothioate linkage
  modified_base 12: mod_base = OTHER; note = 5-methylcytosine with phosphorothioate linkage
  modified_base 13: mod_base = OTHER; note = Nucleotide with phosphorothioate linkage
  modified_base 14: mod_base = OTHER; note = Nucleotide with phosphorothioate linkage
  modified_base 15: mod_base = OTHER; note = Nucleotide with phosphorothioate linkage
  modified_base 16: mod_base = OTHER; note = 2'-O-cyclopropyl modified nucleotide with phosphorothioate linkage
  modified_base 17: mod_base = OTHER; note = 2'-O-methoxyethyl modified thymine with phosphorothioate linkage
  modified_base 18: mod_base = OTHER; note = Locked nucleic acid with phosphorothioate linkage
  modified_base 19: mod_base = OTHER; note = 2'-O-methoxyethyl 5-methylcytosine with phosphorothioate linkage
  modified_base 20: mod_base = OTHER; note = Locked nucleic acid
  misc_feature 1..5: note = RNA
  misc_feature 6..15: note = DNA
  misc_feature 16..20: note = RNA
cagaggtgaagcgaagtgca

SEQ ID NO: 479 - DNA, 20 bp, synthetic construct
  source 1..20: mol_type = other DNA
  modified_base 1: mod_base = OTHER; note = 2'-O-methoxyethyl 5-methylcytosine with phosphorothioate linkage
  modified_base 2: mod_base = OTHER; note = 2'-O-methoxyethyl modified nucleotide with phosphorothioate linkage
  modified_base 3: mod_base = OTHER; note = 2'-O-methoxyethyl modified nucleotide with phosphorothioate linkage
  modified_base 4: mod_base = OTHER; note = 2'-O-methoxyethyl modified nucleotide with phosphorothioate linkage
  modified_base 5: mod_base = OTHER; note = 2'-O-methoxyethyl modified nucleotide with phosphorothioate linkage
  modified_base 6: mod_base = OTHER; note = Nucleotide with phosphorothioate linkage
  modified_base 7: mod_base = OTHER; note = Thymine with phosphorothioate linkage
  modified_base 8: mod_base = OTHER; note = Nucleotide with phosphorothioate linkage
  modified_base 9: mod_base = OTHER; note = Nucleotide with phosphorothioate linkage
  modified_base 10: mod_base = OTHER; note = Nucleotide with phosphorothioate linkage
  modified_base 11: mod_base = OTHER; note = 8-amino-guanosine with phosphorothioate linkage
  modified_base 12: mod_base = OTHER; note = 5-methylcytosine with phosphorothioate linkage
  modified_base 13: mod_base = OTHER; note = Nucleotide with phosphorothioate linkage
  modified_base 14: mod_base = OTHER; note = Nucleotide with phosphorothioate linkage
  modified_base 15: mod_base = OTHER; note = Nucleotide with phosphorothioate linkage
  modified_base 16: mod_base = OTHER; note = Locked nucleic acid with phosphorothioate linkage
  modified_base 17: mod_base = OTHER; note = 2'-O-methoxyethyl modified thymine with phosphorothioate linkage
  modified_base 18: mod_base = OTHER; note = 2'-O-cyclopropyl modified nucleotide with phosphorothioate linkage
  modified_base 19: mod_base = OTHER; note = 2'-O-methoxyethyl 5-methylcytosine with phosphorothioate linkage
  modified_base 20: mod_base = OTHER; note = Locked nucleic acid
  misc_feature 1..5: note = RNA
  misc_feature 6..15: note = DNA
  misc_feature 16..20: note = RNA
cagaggtgaagcgaagtgca

SEQ ID NO: 480 - DNA, 20 bp, synthetic construct
  source 1..20: mol_type = other DNA
  modified_base 1: mod_base = OTHER; note = 2'-O-methoxyethyl 5-methylcytosine with phosphorothioate linkage
  modified_base 2: mod_base = OTHER; note = 2'-O-methoxyethyl modified nucleotide with phosphorothioate linkage
  modified_base 3: mod_base = OTHER; note = 2'-O-methoxyethyl modified nucleotide with phosphorothioate linkage
  modified_base 4: mod_base = OTHER; note = 2'-O-methoxyethyl modified nucleotide with phosphorothioate linkage
  modified_base 5: mod_base = OTHER; note = 2'-O-methoxyethyl modified nucleotide with phosphorothioate linkage
  modified_base 6: mod_base = OTHER; note = Nucleotide with phosphorothioate linkage
  modified_base 7: mod_base = OTHER; note = Thymine with phosphorothioate linkage
  modified_base 8: mod_base = OTHER; note = Nucleotide with phosphorothioate linkage
  modified_base 9: mod_base = OTHER; note = Nucleotide with phosphorothioate linkage
  modified_base 10: mod_base = OTHER; note = Nucleotide with phosphorothioate linkage
  modified_base 11: mod_base = OTHER; note = 8-amino-guanosine with phosphorothioate linkage
  modified_base 12: mod_base = OTHER; note = 5-methylcytosine with phosphorothioate linkage
  modified_base 13: mod_base = OTHER; note = Nucleotide with phosphorothioate linkage
  modified_base 14: mod_base = OTHER; note = Nucleotide with phosphorothioate linkage
  modified_base 15: mod_base = OTHER; note = Nucleotide with phosphorothioate linkage
  modified_base 16: mod_base = OTHER; note = Locked nucleic acid with phosphorothioate linkage
  modified_base 17: mod_base = OTHER; note = 2'-O-methoxyethyl modified thymine with phosphorothioate linkage
  modified_base 18: mod_base = OTHER; note = Locked nucleic acid with phosphorothioate linkage
  modified_base 19: mod_base = OTHER; note = 2'-O-methoxyethyl 5-methylcytosine with phosphorothioate linkage
  modified_base 20: mod_base = OTHER; note = 2'-O-cyclopropyl modified nucleotide
  misc_feature 1..5: note = RNA
  misc_feature 6..15: note = DNA
  misc_feature 16..20: note = RNA
cagaggtgaagcgaagtgca

SEQ ID NO: 481 - DNA, 20 bp, synthetic construct
  source 1..20: mol_type = other DNA
  modified_base 1: mod_base = OTHER; note = 2'-O-methoxyethyl 5-methylcytosine with phosphorothioate linkage
  modified_base 2: mod_base = OTHER; note = 2'-O-methoxyethyl modified nucleotide with phosphorothioate linkage
  modified_base 3: mod_base = OTHER; note = 2'-O-methoxyethyl modified nucleotide with phosphorothioate linkage
  modified_base 4: mod_base = OTHER; note = 2'-O-methoxyethyl modified nucleotide with phosphorothioate linkage
  modified_base 5: mod_base = OTHER; note = 2'-O-methoxyethyl modified nucleotide with phosphorothioate linkage
  modified_base 6: mod_base = OTHER; note = Nucleotide with phosphorothioate linkage
  modified_base 7: mod_base = OTHER; note = Thymine with phosphorothioate linkage
  modified_base 8: mod_base = OTHER; note = Nucleotide with phosphorothioate linkage
  modified_base 9: mod_base = OTHER; note = Nucleotide with phosphorothioate linkage
  modified_base 10: mod_base = OTHER; note = Nucleotide with phosphorothioate linkage
  modified_base 11: mod_base = OTHER; note = 8-amino-guanosine with phosphorothioate linkage
  modified_base 12: mod_base = OTHER; note = 5-methylcytosine with phosphorothioate linkage
  modified_base 13: mod_base = OTHER; note = Nucleotide with phosphorothioate linkage
  modified_base 14: mod_base = OTHER; note = Nucleotide with phosphorothioate linkage
  modified_base 15: mod_base = OTHER; note = Nucleotide with phosphorothioate linkage
  modified_base 16: mod_base = OTHER; note = 2'-O-cyclopropyl modified nucleotide with phosphorothioate linkage
  modified_base 17: mod_base = OTHER; note = 2'-O-methoxyethyl modified thymine with phosphorothioate linkage
  modified_base 18: mod_base = OTHER; note = 2'-O-cyclopropyl modified nucleotide with phosphorothioate linkage
  modified_base 19: mod_base = OTHER; note = 2'-O-methoxyethyl 5-methylcytosine with phosphorothioate linkage
  modified_base 20: mod_base = OTHER; note = Locked nucleic acid
  misc_feature 1..5: note = RNA
  misc_feature 6..15: note = DNA
  misc_feature 16..20: note = RNA
cagaggtgaagcgaagtgca

SEQ ID NO: 482 - DNA, 20 bp, synthetic construct
  source 1..20: mol_type = other DNA
  modified_base 1: mod_base = OTHER; note = 2'-O-methoxyethyl 5-methylcytosine with phosphorothioate linkage
  modified_base 2: mod_base = OTHER; note = 2'-O-methoxyethyl modified nucleotide with phosphorothioate linkage
  modified_base 3: mod_base = OTHER; note = 2'-O-methoxyethyl modified nucleotide with phosphorothioate linkage
  modified_base 4: mod_base = OTHER; note = 2'-O-methoxyethyl modified nucleotide with phosphorothioate linkage
  modified_base 5: mod_base = OTHER; note = 2'-O-methoxyethyl modified nucleotide with phosphorothioate linkage
  modified_base 6: mod_base = OTHER; note = Nucleotide with phosphorothioate linkage
  modified_base 7: mod_base = OTHER; note = Thymine with phosphorothioate linkage
  modified_base 8: mod_base = OTHER; note = Nucleotide with phosphorothioate linkage
  modified_base 9: mod_base = OTHER; note = Nucleotide with phosphorothioate linkage
  modified_base 10: mod_base = OTHER; note = Nucleotide with phosphorothioate linkage
  modified_base 11: mod_base = OTHER; note = 8-amino-guanosine with phosphorothioate linkage
  modified_base 12: mod_base = OTHER; note = 5-methylcytosine with phosphorothioate linkage
  modified_base 13: mod_base = OTHER; note = Nucleotide with phosphorothioate linkage
  modified_base 14: mod_base = OTHER; note = Nucleotide with phosphorothioate linkage
  modified_base 15: mod_base = OTHER; note = Nucleotide with phosphorothioate linkage
  modified_base 16: mod_base = OTHER; note = Locked nucleic acid with phosphorothioate linkage
  modified_base 17: mod_base = OTHER; note = 2'-O-methoxyethyl modified thymine with phosphorothioate linkage
  modified_base 18: mod_base = OTHER; note = 2'-O-cyclopropyl modified nucleotide with phosphorothioate linkage
  modified_base 19: mod_base = OTHER; note = 2'-O-methoxyethyl 5-methylcytosine with phosphorothioate linkage
  modified_base 20: mod_base = OTHER; note = 2'-O-cyclopropyl modified nucleotide
  misc_feature 1..5: note = RNA
  misc_feature 6..15: note = DNA
  misc_feature 16..20: note = RNA
cagaggtgaagcgaagtgca

SEQ ID NO: 483 - DNA, 20 bp, synthetic construct
  source 1..20: mol_type = other DNA
  modified_base 1: mod_base = OTHER; note = 2'-O-methoxyethyl 5-methylcytosine with phosphorothioate linkage
  modified_base 2: mod_base = OTHER; note = 2'-O-methoxyethyl modified nucleotide with phosphorothioate linkage
  modified_base 3: mod_base = OTHER; note = 2'-O-methoxyethyl modified nucleotide with phosphorothioate linkage
  modified_base 4: mod_base = OTHER; note = 2'-O-methoxyethyl modified nucleotide with phosphorothioate linkage
  modified_base 5: mod_base = OTHER; note = 2'-O-methoxyethyl modified nucleotide with phosphorothioate linkage
  modified_base 6: mod_base = OTHER; note = Nucleotide with phosphorothioate linkage
  modified_base 7: mod_base = OTHER; note = Thymine with phosphorothioate linkage
  modified_base 8: mod_base = OTHER; note = Nucleotide with phosphorothioate linkage
  modified_base 9: mod_base = OTHER; note = Nucleotide with phosphorothioate linkage
  modified_base 10: mod_base = OTHER; note = Nucleotide with phosphorothioate linkage
  modified_base 11: mod_base = OTHER; note = 8-amino-guanosine with phosphorothioate linkage
  modified_base 12: mod_base = OTHER; note = 5-methylcytosine with phosphorothioate linkage
  modified_base 13: mod_base = OTHER; note = Nucleotide with phosphorothioate linkage
  modified_base 14: mod_base = OTHER; note = Nucleotide with phosphorothioate linkage
  modified_base 15: mod_base = OTHER; note = Nucleotide with phosphorothioate linkage
  modified_base 16: mod_base = OTHER; note = 2'-O-cyclopropyl modified nucleotide with phosphorothioate linkage
  modified_base 17: mod_base = OTHER; note = 2'-O-methoxyethyl modified thymine with phosphorothioate linkage
  modified_base 18: mod_base = OTHER; note = Locked nucleic acid with phosphorothioate linkage
  modified_base 19: mod_base = OTHER; note = 2'-O-methoxyethyl 5-methylcytosine with phosphorothioate linkage
  modified_base 20: mod_base = OTHER; note = 2'-O-cyclopropyl modified nucleotide
  misc_feature 1..5: note = RNA
  misc_feature 6..15: note = DNA
  misc_feature 16..20: note = RNA
cagaggtgaagcgaagtgca

SEQ ID NO: 484 - DNA, 20 bp, synthetic construct
  source 1..20: mol_type = other DNA
  modified_base 1: mod_base = OTHER; note = 2'-O-methoxyethyl 5-methylcytosine with phosphorothioate linkage
  modified_base 2: mod_base = OTHER; note = 2'-O-methoxyethyl modified nucleotide with phosphorothioate linkage
  modified_base 3: mod_base = OTHER; note = 2'-O-methoxyethyl modified nucleotide with phosphorothioate linkage
  modified_base 4: mod_base = OTHER; note = 2'-O-methoxyethyl modified nucleotide with phosphorothioate linkage
  modified_base 5: mod_base = OTHER; note = 2'-O-methoxyethyl modified nucleotide with phosphorothioate linkage
  modified_base 6: mod_base = OTHER; note = Nucleotide with phosphorothioate linkage
  modified_base 7: mod_base = OTHER; note = Thymine with phosphorothioate linkage
  modified_base 8: mod_base = OTHER; note = Nucleotide with phosphorothioate linkage
  modified_base 9: mod_base = OTHER; note = Nucleotide with phosphorothioate linkage
  modified_base 10: mod_base = OTHER; note = Nucleotide with phosphorothioate linkage
  modified_base 11: mod_base = OTHER; note = Nucleotide with phosphorothioate linkage
  modified_base 12: mod_base = OTHER; note = 5-methylcytosine with phosphorothioate linkage
  modified_base 13: mod_base = OTHER; note = Nucleotide with phosphorothioate linkage
  modified_base 14: mod_base = OTHER; note = Nucleotide with phosphorothioate linkage
  modified_base 15: mod_base = OTHER; note = Nucleotide with phosphorothioate linkage
  modified_base 16: mod_base = OTHER; note = 2'-O-methoxyethyl modified nucleotide with S-stereo-defined phosphorothioate linkage
  modified_base 17: mod_base = OTHER; note = 2'-O-methoxyethyl modified thymine with phosphorothioate linkage
  modified_base 18: mod_base = OTHER; note = 2'-O-methoxyethyl modified nucleotide with phosphorothioate linkage
  modified_base 19: mod_base = OTHER; note = 2'-O-methoxyethyl 5-methylcytosine with phosphorothioate linkage
  modified_base 20: mod_base = OTHER; note = 2'-O-methoxyethyl modified nucleotide
  misc_feature 1..5: note = RNA
  misc_feature 6..15: note = DNA
  misc_feature 16..20: note = RNA
cagaggtgaagcgaagtgca

SEQ ID NO: 485 - DNA, 20 bp, synthetic construct
  source 1..20: mol_type = other DNA
  modified_base 1: mod_base = OTHER; note = 2'-O-methoxyethyl 5-methylcytosine with phosphorothioate linkage
  modified_base 2: mod_base = OTHER; note = 2'-O-methoxyethyl modified nucleotide with phosphorothioate linkage
  modified_base 3: mod_base = OTHER; note = 2'-O-methoxyethyl modified nucleotide with phosphorothioate linkage
  modified_base 4: mod_base = OTHER; note = 2'-O-methoxyethyl modified nucleotide with phosphorothioate linkage
  modified_base 5: mod_base = OTHER; note = 2'-O-methoxyethyl modified nucleotide with phosphorothioate linkage
  modified_base 6: mod_base = OTHER; note = Nucleotide with phosphorothioate linkage
  modified_base 7: mod_base = OTHER; note = Thymine with phosphorothioate linkage
  modified_base 8: mod_base = OTHER; note = Nucleotide with phosphorothioate linkage
  modified_base 9: mod_base = OTHER; note = Nucleotide with phosphorothioate linkage
  modified_base 10: mod_base = OTHER; note = Nucleotide with phosphorothioate linkage
  modified_base 11: mod_base = OTHER; note = Nucleotide with phosphorothioate linkage
  modified_base 12: mod_base = OTHER; note = 5-methylcytosine with phosphorothioate linkage
  modified_base 13: mod_base = OTHER; note = Nucleotide with phosphorothioate linkage
  modified_base 14: mod_base = OTHER; note = Nucleotide with phosphorothioate linkage
  modified_base 15: mod_base = OTHER; note = Nucleotide with phosphorothioate linkage
  modified_base 16: mod_base = OTHER; note = 2'-O-methoxyethyl modified nucleotide with phosphorothioate linkage
  modified_base 17: mod_base = OTHER; note = 2'-O-methoxyethyl thymine with S-stereo-defined phosphorothioate linkage
  modified_base 18: mod_base = OTHER; note = 2'-O-methoxyethyl modified nucleotide with phosphorothioate linkage
  modified_base 19: mod_base = OTHER; note = 2'-O-methoxyethyl 5-methylcytosine with phosphorothioate linkage
  modified_base 20: mod_base = OTHER; note = 2'-O-methoxyethyl modified nucleotide
  misc_feature 1..5: note = RNA
  misc_feature 6..15: note = DNA
  misc_feature 16..20: note = RNA
cagaggtgaagcgaagtgca

SEQ ID NO: 486 - DNA, 20 bp, synthetic construct
  source 1..20: mol_type = other DNA
  modified_base 1: mod_base = OTHER; note = 2'-O-methoxyethyl 5-methylcytosine with phosphorothioate linkage
  modified_base 2: mod_base = OTHER; note = 2'-O-methoxyethyl modified nucleotide with phosphorothioate linkage
  modified_base 3: mod_base = OTHER; note = 2'-O-methoxyethyl modified nucleotide with phosphorothioate linkage
  modified_base 4: mod_base = OTHER; note = 2'-O-methoxyethyl modified nucleotide with phosphorothioate linkage
  modified_base 5: mod_base = OTHER; note = 2'-O-methoxyethyl modified nucleotide with phosphorothioate linkage
  modified_base 6: mod_base = OTHER; note = Nucleotide with phosphorothioate linkage
  modified_base 7: mod_base = OTHER; note = Thymine with phosphorothioate linkage
  modified_base 8: mod_base = OTHER; note = Nucleotide with phosphorothioate linkage
  modified_base 9: mod_base = OTHER; note = Nucleotide with phosphorothioate linkage
  modified_base 10: mod_base = OTHER; note = Nucleotide with phosphorothioate linkage
  modified_base 11: mod_base = OTHER; note = Nucleotide with phosphorothioate linkage
  modified_base 12: mod_base = OTHER; note = 5-methylcytosine with phosphorothioate linkage
  modified_base 13: mod_base = OTHER; note = Nucleotide with phosphorothioate linkage
  modified_base 14: mod_base = OTHER; note = Nucleotide with phosphorothioate linkage
  modified_base 15: mod_base = OTHER; note = Nucleotide with phosphorothioate linkage
  modified_base 16: mod_base = OTHER; note = 2'-O-methoxyethyl modified nucleotide with phosphorothioate linkage
  modified_base 17: mod_base = OTHER; note = 2'-O-methoxyethyl modified thymine with phosphorothioate linkage
  modified_base 18: mod_base = OTHER; note = 2'-O-methoxyethyl modified nucleotide with S-stereo-defined phosphorothioate linkage
  modified_base 19: mod_base = OTHER; note = 2'-O-methoxyethyl 5-methylcytosine with phosphorothioate linkage
  modified_base 20: mod_base = OTHER; note = 2'-O-methoxyethyl modified nucleotide
  misc_feature 1..5: note = RNA
  misc_feature 6..15: note = DNA
  misc_feature 16..20: note = RNA
cagaggtgaagcgaagtgca

SEQ ID NO: 487 - DNA, 20 bp, synthetic construct
  source 1..20: mol_type = other DNA
  modified_base 1: mod_base = OTHER; note = 2'-O-methoxyethyl 5-methylcytosine with phosphorothioate linkage
  modified_base 2: mod_base = OTHER; note = 2'-O-methoxyethyl modified nucleotide with phosphorothioate linkage
  modified_base 3: mod_base = OTHER; note = 2'-O-methoxyethyl modified nucleotide with phosphorothioate linkage
  modified_base 4: mod_base = OTHER; note = 2'-O-methoxyethyl modified nucleotide with phosphorothioate linkage
  modified_base 5: mod_base = OTHER; note = 2'-O-methoxyethyl modified nucleotide with phosphorothioate linkage
  modified_base 6: mod_base = OTHER; note = Nucleotide with phosphorothioate linkage
  modified_base 7: mod_base = OTHER; note = Thymine with phosphorothioate linkage
  modified_base 8: mod_base = OTHER; note = Nucleotide with phosphorothioate linkage
  modified_base 9: mod_base = OTHER; note = Nucleotide with phosphorothioate linkage
  modified_base 10: mod_base = OTHER; note = Nucleotide with phosphorothioate linkage
  modified_base 11: mod_base = OTHER; note = Nucleotide with phosphorothioate linkage
  modified_base 12: mod_base = OTHER; note = 5-methylcytosine with phosphorothioate linkage
  modified_base 13: mod_base = OTHER; note = Nucleotide with phosphorothioate linkage
  modified_base 14: mod_base = OTHER; note = Nucleotide with phosphorothioate linkage
  modified_base 15: mod_base = OTHER; note = Nucleotide with phosphorothioate linkage
  modified_base 16: mod_base = OTHER; note = 2'-O-methoxyethyl modified nucleotide with phosphorothioate linkage
  modified_base 17: mod_base = OTHER; note = 2'-O-methoxyethyl modified thymine with phosphorothioate linkage
  modified_base 18: mod_base = OTHER; note = 2'-O-methoxyethyl modified nucleotide with phosphorothioate linkage
  modified_base 19: mod_base = OTHER; note = 2'-O-methoxyethyl 5-methylcytosine with S-stereo-defined phosphorothioate linkage
  modified_base 20: mod_base = OTHER; note = 2'-O-methoxyethyl modified nucleotide
  misc_feature 1..5: note = RNA
  misc_feature 6..15: note = DNA
  misc_feature 16..20: note = RNA
cagaggtgaagcgaagtgca

SEQ ID NO: 488 - DNA, 20 bp, synthetic construct
  source 1..20: mol_type = other DNA
  modified_base 1: mod_base = OTHER; note = 2'-O-methoxyethyl 5-methylcytosine with phosphorothioate linkage
  modified_base 2: mod_base = OTHER; note = 2'-O-methoxyethyl modified nucleotide with phosphorothioate linkage
  modified_base 3: mod_base = OTHER; note = 2'-O-methoxyethyl modified nucleotide with phosphorothioate linkage
  modified_base 4: mod_base = OTHER; note = 2'-O-methoxyethyl modified nucleotide with phosphorothioate linkage
  modified_base 5: mod_base = OTHER; note = 2'-O-methoxyethyl modified nucleotide with phosphorothioate linkage
  modified_base 6: mod_base = OTHER; note = Nucleotide with phosphorothioate linkage
  modified_base 7: mod_base = OTHER; note = Thymine with phosphorothioate linkage
  modified_base 8: mod_base = OTHER; note = Nucleotide with phosphorothioate linkage
  modified_base 9: mod_base = OTHER; note = Nucleotide with phosphorothioate linkage
  modified_base 10: mod_base = OTHER; note = Nucleotide with phosphorothioate linkage
  modified_base 11: mod_base = OTHER; note = Nucleotide with phosphorothioate linkage
  modified_base 12: mod_base = OTHER; note = 5-methylcytosine with phosphorothioate linkage
  modified_base 13: mod_base = OTHER; note = Nucleotide with phosphorothioate linkage
  modified_base 14: mod_base = OTHER; note = Nucleotide with phosphorothioate linkage
  modified_base 15: mod_base = OTHER; note = Nucleotide with phosphorothioate linkage
  modified_base 16: mod_base = OTHER; note = 2'-O-methoxyethyl modified nucleotide with R-stereo-defined phosphorothioate linkage
  modified_base 17: mod_base = OTHER; note = 2'-O-methoxyethyl modified thymine with phosphorothioate linkage
  modified_base 18: mod_base = OTHER; note = 2'-O-methoxyethyl modified nucleotide with phosphorothioate linkage
  modified_base 19: mod_base = OTHER; note = 2'-O-methoxyethyl 5-methylcytosine with phosphorothioate linkage
  modified_base 20: mod_base = OTHER; note = 2'-O-methoxyethyl modified nucleotide
  misc_feature 1..5: note = RNA
  misc_feature 6..15: note = DNA
  misc_feature 16..20: note = RNA
cagaggtgaagcgaagtgca

SEQ ID NO: 489 - DNA, 20 bp, synthetic construct
  source 1..20: mol_type = other DNA
  modified_base 1: mod_base = OTHER; note = 2'-O-methoxyethyl 5-methylcytosine with phosphorothioate linkage
  modified_base 2: mod_base = OTHER; note = 2'-O-methoxyethyl modified nucleotide with phosphorothioate linkage
  modified_base 3: mod_base = OTHER; note = 2'-O-methoxyethyl modified nucleotide with phosphorothioate linkage
  modified_base 4: mod_base = OTHER; note = 2'-O-methoxyethyl modified nucleotide with phosphorothioate linkage
  modified_base 5: mod_base = OTHER; note = 2'-O-methoxyethyl modified nucleotide with phosphorothioate linkage
  modified_base 6: mod_base = OTHER; note = Nucleotide with phosphorothioate linkage
  modified_base 7: mod_base = OTHER; note = Thymine with phosphorothioate linkage
  modified_base 8: mod_base = OTHER; note = Nucleotide with phosphorothioate linkage
  modified_base 9: mod_base = OTHER; note = Nucleotide with phosphorothioate linkage
  modified_base 10: mod_base = OTHER; note = Nucleotide with phosphorothioate linkage
  modified_base 11: mod_base = OTHER; note = Nucleotide with phosphorothioate linkage
  modified_base 12: mod_base = OTHER; note = 5-methylcytosine with phosphorothioate linkage
  modified_base 13: mod_base = OTHER; note = Nucleotide with phosphorothioate linkage
  modified_base 14: mod_base = OTHER; note = Nucleotide with phosphorothioate linkage
  modified_base 15: mod_base = OTHER; note = Nucleotide with phosphorothioate linkage
  modified_base 16: mod_base = OTHER; note = 2'-O-methoxyethyl modified nucleotide with phosphorothioate linkage
  modified_base 17: mod_base = OTHER; note = 2'-O-methoxyethyl thymine with R-stereo-defined phosphorothioate linkage
  modified_base 18: mod_base = OTHER; note = 2'-O-methoxyethyl modified nucleotide with phosphorothioate linkage
  modified_base 19: mod_base = OTHER; note = 2'-O-methoxyethyl 5-methylcytosine with phosphorothioate linkage
  modified_base 20: mod_base = OTHER; note = 2'-O-methoxyethyl modified nucleotide
  misc_feature 1..5: note = RNA
  misc_feature 6..15: note = DNA
  misc_feature 16..20: note = RNA
cagaggtgaagcgaagtgca

SEQ ID NO: 490 - DNA, 20 bp, synthetic construct
  source 1..20: mol_type = other DNA
  modified_base 1: mod_base = OTHER; note = 2'-O-methoxyethyl 5-methylcytosine with phosphorothioate linkage
  modified_base 2: mod_base = OTHER; note = 2'-O-methoxyethyl modified nucleotide with phosphorothioate linkage
  modified_base 3: mod_base = OTHER; note = 2'-O-methoxyethyl modified nucleotide with phosphorothioate linkage
  modified_base 4: mod_base = OTHER; note = 2'-O-methoxyethyl modified nucleotide with phosphorothioate linkage
  modified_base 5: mod_base = OTHER; note = 2'-O-methoxyethyl modified nucleotide with phosphorothioate linkage
  modified_base 6: mod_base = OTHER; note = Nucleotide with phosphorothioate linkage
  modified_base 7: mod_base = OTHER; note = Thymine with phosphorothioate linkage
  modified_base 8: mod_base = OTHER; note = Nucleotide with phosphorothioate linkage
  modified_base 9: mod_base = OTHER; note = Nucleotide with phosphorothioate linkage
  modified_base 10: mod_base = OTHER; note = Nucleotide with phosphorothioate linkage
  modified_base 11: mod_base = OTHER; note = Nucleotide with phosphorothioate linkage
  modified_base 12: mod_base = OTHER; note = 5-methylcytosine with phosphorothioate linkage
  modified_base 13: mod_base = OTHER; note = Nucleotide with phosphorothioate linkage
  modified_base 14: mod_base = OTHER; note = Nucleotide with phosphorothioate linkage
  modified_base 15: mod_base = OTHER; note = Nucleotide with phosphorothioate linkage
  modified_base 16: mod_base = OTHER; note = 2'-O-methoxyethyl modified nucleotide with phosphorothioate linkage
  modified_base 17: mod_base = OTHER; note = 2'-O-methoxyethyl modified thymine with phosphorothioate linkage
  modified_base 18: mod_base = OTHER; note = 2'-O-methoxyethyl modified nucleotide with R-stereo-defined phosphorothioate linkage
  modified_base 19: mod_base = OTHER; note = 2'-O-methoxyethyl 5-methylcytosine with phosphorothioate linkage
  modified_base 20: mod_base = OTHER; note = 2'-O-methoxyethyl modified nucleotide
  misc_feature 1..5: note = RNA
  misc_feature 6..15: note = DNA
  misc_feature 16..20: note = RNA
cagaggtgaagcgaagtgca

SEQ ID NO: 491 - DNA, 20 bp, synthetic construct
  source 1..20: mol_type = other DNA
  modified_base 1: mod_base = OTHER; note = Locked 5-methylcytosine with phosphorothioate linkage
  modified_base 2: mod_base = OTHER; note = 2'-O-methoxyethyl modified nucleotide with phosphorothioate linkage
  modified_base 3: mod_base = OTHER; note = 2'-O-methoxyethyl modified nucleotide with phosphorothioate linkage
  modified_base 4: mod_base = OTHER; note = 2'-O-methoxyethyl modified nucleotide with phosphorothioate linkage
  modified_base 5: mod_base = OTHER; note = 2'-O-methoxyethyl modified nucleotide with phosphorothioate linkage
  modified_base 6: mod_base = OTHER; note = 2'-O-methylcyclopropyl modified nucleotide with phosphorothioate linkage
  modified_base 7: mod_base = OTHER; note = Thymine with phosphorothioate linkage
  modified_base 8: mod_base = OTHER; note = Nucleotide with phosphorothioate linkage
  modified_base 9: mod_base = OTHER; note = Nucleotide with phosphorothioate linkage
  modified_base 10: mod_base = OTHER; note = Nucleotide with phosphorothioate linkage
  modified_base 11: mod_base = OTHER; note = Nucleotide with phosphorothioate linkage
  modified_base 12: mod_base = OTHER; note = 5-methylcytosine with phosphorothioate linkage
  modified_base 13: mod_base = OTHER; note = Nucleotide with phosphorothioate linkage
  modified_base 14: mod_base = OTHER; note = Nucleotide with phosphorothioate linkage
  modified_base 15: mod_base = OTHER; note = Nucleotide with phosphorothioate linkage
  modified_base 16: mod_base = OTHER; note = 2'-O-methoxyethyl modified nucleotide with phosphorothioate linkage
  modified_base 17: mod_base = OTHER; note = Locked thymine with phosphorothioate linkage
  modified_base 18: mod_base = OTHER; note = 2'-O-methoxyethyl modified nucleotide with phosphorothioate linkage
  modified_base 19: mod_base = OTHER; note = 2'-O-methoxyethyl 5-methylcytosine with phosphorothioate linkage
  modified_base 20: mod_base = OTHER; note = 2'-O-methoxyethyl modified nucleotide
  misc_feature 1..6: note = RNA
  misc_feature 7..15: note = DNA
  misc_feature 16..20: note = RNA
cagaggtgaagcgaagtgca

SEQ ID NO: 492 - DNA, 20 bp, synthetic construct
  source 1..20: mol_type = other DNA
  modified_base 1: mod_base = OTHER; note = Locked 5-methylcytosine with phosphorothioate linkage
  modified_base 2: mod_base = OTHER; note = 2'-O-methoxyethyl modified nucleotide with phosphorothioate linkage
  modified_base 3: mod_base = OTHER; note = 2'-O-methoxyethyl modified nucleotide with phosphorothioate linkage
  modified_base 4: mod_base = OTHER; note = 2'-O-methoxyethyl modified nucleotide with phosphorothioate linkage
  modified_base 5: mod_base = OTHER; note = 2'-O-methoxyethyl modified nucleotide with phosphorothioate linkage
  modified_base 6: mod_base = OTHER; note = Nucleotide with phosphorothioate linkage
  modified_base 7: mod_base = OTHER; note = Thymine with phosphorothioate linkage
  modified_base 8: mod_base = OTHER; note = 2'-O-methylcyclopropyl modified nucleotide with phosphorothioate linkage
  modified_base 9: mod_base = OTHER; note = Nucleotide with phosphorothioate linkage
  modified_base 10: mod_base = OTHER; note = Nucleotide with phosphorothioate linkage
  modified_base 11: mod_base = OTHER; note = Nucleotide with phosphorothioate linkage
  modified_base 12: mod_base = OTHER; note = 5-methylcytosine with phosphorothioate linkage
  modified_base 13: mod_base = OTHER; note = Nucleotide with phosphorothioate linkage
  modified_base 14: mod_base = OTHER; note = Nucleotide with phosphorothioate linkage
  modified_base 15: mod_base = OTHER; note = Nucleotide with phosphorothioate linkage
  modified_base 16: mod_base = OTHER; note = 2'-O-methoxyethyl modified nucleotide with phosphorothioate linkage
  modified_base 17: mod_base = OTHER; note = Locked thymine with phosphorothioate linkage
  modified_base 18: mod_base = OTHER; note = 2'-O-methoxyethyl modified nucleotide with phosphorothioate linkage
  modified_base 19: mod_base = OTHER; note = 2'-O-methoxyethyl 5-methylcytosine with phosphorothioate linkage
  modified_base 20: mod_base = OTHER; note = 2'-O-methoxyethyl modified nucleotide
  misc_feature 1..5: note = RNA
  misc_feature 6..7: note = DNA
  misc_feature 8: note = RNA
  misc_feature 9..15: note = DNA
  misc_feature 16..20: note = RNA
cagaggtgaagcgaagtgca

SEQ ID NO: 493 - DNA, 20 bp, synthetic construct
  source 1..20: mol_type = other DNA
  modified_base 1: mod_base = OTHER; note = Locked 5-methylcytosine with phosphorothioate linkage
  modified_base 2: mod_base = OTHER; note = 2'-O-methoxyethyl modified nucleotide with phosphorothioate linkage
  modified_base 3: mod_base = OTHER; note = 2'-O-methoxyethyl modified nucleotide with phosphorothioate linkage
  modified_base 4: mod_base = OTHER; note = 2'-O-methoxyethyl modified nucleotide with phosphorothioate linkage
  modified_base 5: mod_base = OTHER; note = 2'-O-methoxyethyl modified nucleotide with phosphorothioate linkage
  modified_base 6: mod_base = OTHER; note = 2'-O-methylcyclopropyl modified nucleotide with phosphorothioate linkage
  modified_base 7: mod_base = OTHER; note = Thymine with phosphorothioate linkage
  modified_base 8: mod_base = OTHER; note = 2'-O-methylcyclopropyl modified nucleotide with phosphorothioate linkage
  modified_base 9: mod_base = OTHER; note = Nucleotide with phosphorothioate linkage
  modified_base 10: mod_base = OTHER; note = Nucleotide with phosphorothioate linkage
  modified_base 11: mod_base = OTHER; note = Nucleotide with phosphorothioate linkage
  modified_base 12: mod_base = OTHER; note = 5-methylcytosine with phosphorothioate linkage
  modified_base 13: mod_base = OTHER; note = Nucleotide with phosphorothioate linkage
  modified_base 14: mod_base = OTHER; note = Nucleotide with phosphorothioate linkage
  modified_base 15: mod_base = OTHER; note = Nucleotide with phosphorothioate linkage
  modified_base 16: mod_base = OTHER; note = 2'-O-methoxyethyl modified nucleotide with phosphorothioate linkage
  modified_base 17: mod_base = OTHER; note = Locked thymine with phosphorothioate linkage
  modified_base 18: mod_base = OTHER; note = 2'-O-methoxyethyl modified nucleotide with phosphorothioate linkage
  modified_base 19: mod_base = OTHER; note = 2'-O-methoxyethyl 5-methylcytosine with phosphorothioate linkage
  modified_base 20: mod_base = OTHER; note = 2'-O-methoxyethyl modified nucleotide
  misc_feature 1..6: note = RNA
  misc_feature 7: note = DNA
  misc_feature 8: note = RNA
  misc_feature 9..15: note = DNA
  misc_feature 16..20: note = RNA
cagaggtgaagcgaagtgca

SEQ ID NO: 494 - DNA, 20 bp, synthetic construct
  source 1..20: mol_type = other DNA
  modified_base 1: mod_base = OTHER; note = 2'-O-methoxyethyl 5-methylcytosine with phosphorothioate linkage
  modified_base 2: mod_base = OTHER; note = Locked nucleic acid with phosphorothioate linkage
  modified_base 3: mod_base = OTHER; note = 2'-O-methoxyethyl modified nucleotide with phosphorothioate linkage
  modified_base 4: mod_base = OTHER; note = Locked nucleic acid with phosphorothioate linkage
  modified_base 5: mod_base = OTHER; note = 2'-O-methoxyethyl modified nucleotide with phosphorothioate linkage
  modified_base 6: mod_base = OTHER; note = 2'-O-methylcyclopropyl modified nucleotide with phosphorothioate linkage
  modified_base 7: mod_base = OTHER; note = Thymine with phosphorothioate linkage
  modified_base 8: mod_base = OTHER; note = Nucleotide with phosphorothioate linkage
  modified_base 9: mod_base = OTHER; note = Nucleotide with phosphorothioate linkage
  modified_base 10: mod_base = OTHER; note = Nucleotide with phosphorothioate linkage
  modified_base 11: mod_base = OTHER; note = Nucleotide with phosphorothioate linkage
  modified_base 12: mod_base = OTHER; note = 5-methylcytosine with phosphorothioate linkage
  modified_base 13: mod_base = OTHER; note = Nucleotide with phosphorothioate linkage
  modified_base 14: mod_base = OTHER; note = Nucleotide with phosphorothioate linkage
  modified_base 15: mod_base = OTHER; note = Nucleotide with phosphorothioate linkage
  modified_base 16: mod_base = OTHER; note = 2'-O-methoxyethyl modified nucleotide with phosphorothioate linkage
  modified_base 17: mod_base = OTHER; note = 2'-O-methoxyethyl modified thymine with phosphorothioate linkage
  modified_base 18: mod_base = OTHER; note = 2'-O-methoxyethyl modified nucleotide with phosphorothioate linkage
  modified_base 19: mod_base = OTHER; note = 2'-O-methoxyethyl 5-methylcytosine with phosphorothioate linkage
  modified_base 20: mod_base = OTHER; note = 2'-O-methoxyethyl modified nucleotide
  misc_feature 1..6: note = RNA
  misc_feature 7..15: note = DNA
  misc_feature 16..20: note = RNA
cagaggtgaagcgaagtgca

SEQ ID NO: 495 - DNA, 20 bp, synthetic construct
  source 1..20: mol_type = other DNA
  modified_base 1: mod_base = OTHER; note = 2'-O-methoxyethyl 5-methylcytosine with phosphorothioate linkage
  modified_base 2: mod_base = OTHER; note = Locked nucleic acid with phosphorothioate linkage
  modified_base 3: mod_base = OTHER; note = 2'-O-methoxyethyl modified nucleotide with phosphorothioate linkage
  modified_base 4: mod_base = OTHER; note = Locked nucleic acid with phosphorothioate linkage
  modified_base 5: mod_base = OTHER; note = 2'-O-methoxyethyl modified nucleotide with phosphorothioate linkage
  modified_base 6: mod_base = OTHER; note = Nucleotide with phosphorothioate linkage
  modified_base 7: mod_base = OTHER; note = Thymine with phosphorothioate linkage
  modified_base 8: mod_base = OTHER; note = 2'-O-methylcyclopropyl modified nucleotide with phosphorothioate linkage
  modified_base 9: mod_base = OTHER; note = Nucleotide with phosphorothioate linkage
  modified_base 10: mod_base = OTHER; note = Nucleotide with phosphorothioate linkage
  modified_base 11: mod_base = OTHER; note = Nucleotide with phosphorothioate linkage
  modified_base 12: mod_base = OTHER; note = 5-methylcytosine with phosphorothioate linkage
  modified_base 13: mod_base = OTHER; note = Nucleotide with phosphorothioate linkage
  modified_base 14: mod_base = OTHER; note = Nucleotide with phosphorothioate linkage
  modified_base 15: mod_base = OTHER; note = Nucleotide with phosphorothioate linkage
  modified_base 16: mod_base = OTHER; note = 2'-O-methoxyethyl modified nucleotide with phosphorothioate linkage
  modified_base 17: mod_base = OTHER; note = 2'-O-methoxyethyl modified thymine with phosphorothioate linkage
  modified_base 18: mod_base = OTHER; note = 2'-O-methoxyethyl modified nucleotide with phosphorothioate linkage
  modified_base 19: mod_base = OTHER; note = 2'-O-methoxyethyl 5-methylcytosine with phosphorothioate linkage
  modified_base 20: mod_base = OTHER; note = 2'-O-methoxyethyl modified nucleotide
  misc_feature 1..5: note = RNA
  misc_feature 6..7: note = DNA
  misc_feature 8: note = RNA
  misc_feature 9..15: note = DNA
  misc_feature 16..20: note = RNA
cagaggtgaagcgaagtgca

SEQ ID NO: 496 - DNA, 20 bp, synthetic construct
  source 1..20: mol_type = other DNA
  modified_base 1: mod_base = OTHER; note = 2'-O-methoxyethyl 5-methylcytosine with phosphorothioate linkage
  modified_base 2: mod_base = OTHER; note = Locked nucleic acid with phosphorothioate linkage
  modified_base 3: mod_base = OTHER; note = 2'-O-methoxyethyl modified nucleotide with phosphorothioate linkage
  modified_base 4: mod_base = OTHER; note = Locked nucleic acid with phosphorothioate linkage
  modified_base 5: mod_base = OTHER; note = 2'-O-methoxyethyl modified nucleotide with phosphorothioate linkage
  modified_base 6: mod_base = OTHER; note = 2'-O-methylcyclopropyl modified nucleotide with phosphorothioate linkage
  modified_base 7: mod_base = OTHER; note = Thymine with phosphorothioate linkage
  modified_base 8: mod_base = OTHER; note = 2'-O-methylcyclopropyl modified nucleotide with phosphorothioate linkage
  modified_base 9: mod_base = OTHER; note = Nucleotide with phosphorothioate linkage
  modified_base 10: mod_base = OTHER; note = Nucleotide with phosphorothioate linkage
  modified_base 11: mod_base = OTHER; note = Nucleotide with phosphorothioate linkage
  modified_base 12: mod_base = OTHER; note = 5-methylcytosine with phosphorothioate linkage
  modified_base 13: mod_base = OTHER; note = Nucleotide with phosphorothioate linkage
  modified_base 14: mod_base = OTHER; note = Nucleotide with phosphorothioate linkage
  modified_base 15: mod_base = OTHER; note = Nucleotide with phosphorothioate linkage
  modified_base 16: mod_base = OTHER; note = 2'-O-methoxyethyl modified nucleotide with phosphorothioate linkage
  modified_base 17: mod_base = OTHER; note = 2'-O-methoxyethyl modified thymine with phosphorothioate linkage
  modified_base 18: mod_base = OTHER; note = 2'-O-methoxyethyl modified nucleotide with phosphorothioate linkage
  modified_base 19: mod_base = OTHER; note = 2'-O-methoxyethyl 5-methylcytosine with phosphorothioate linkage
  modified_base 20: mod_base = OTHER; note = 2'-O-methoxyethyl modified nucleotide
  misc_feature 1..6: note = RNA
  misc_feature 7: note = DNA
  misc_feature 8: note = RNA
  misc_feature 9..15: note = DNA
  misc_feature 16..20: note = RNA
cagaggtgaagcgaagtgca

SEQ ID NO: 497 - DNA, 20 bp, synthetic construct
  source 1..20: mol_type = other DNA
  modified_base 1: mod_base = OTHER; note = 2'-O-methoxyethyl 5-methylcytosine with phosphorothioate linkage
  modified_base 2: mod_base = OTHER; note = 2'-O-methoxyethyl modified nucleotide with phosphorothioate linkage
  modified_base 3: mod_base = OTHER; note = Locked nucleic acid with phosphorothioate linkage
  modified_base 4: mod_base = OTHER; note = 2'-O-methoxyethyl modified nucleotide with phosphorothioate linkage
  modified_base 5: mod_base = OTHER; note = 2'-O-methoxyethyl modified nucleotide with phosphorothioate linkage
  modified_base 6: mod_base = OTHER; note = 2'-O-methylcyclopropyl modified nucleotide with phosphorothioate linkage
  modified_base 7: mod_base = OTHER; note = Thymine with phosphorothioate linkage
  modified_base 8: mod_base = OTHER; note = Nucleotide with phosphorothioate linkage
  modified_base 9: mod_base = OTHER; note = Nucleotide with phosphorothioate linkage
  modified_base 10: mod_base = OTHER; note = Nucleotide with phosphorothioate linkage
  modified_base 11: mod_base = OTHER; note = Nucleotide with phosphorothioate linkage
  modified_base 12: mod_base = OTHER; note = 5-methylcytosine with phosphorothioate linkage
  modified_base 13: mod_base = OTHER; note = Nucleotide with phosphorothioate linkage
  modified_base 14: mod_base = OTHER; note = Nucleotide with phosphorothioate linkage
  modified_base 15: mod_base = OTHER; note = Nucleotide with phosphorothioate linkage
  modified_base 16: mod_base = OTHER; note = 2'-O-methoxyethyl modified nucleotide with phosphorothioate linkage
  modified_base 17: mod_base = OTHER; note = 2'-O-methoxyethyl modified thymine with phosphorothioate linkage
  modified_base 18: mod_base = OTHER; note = Locked nucleic acid with phosphorothioate linkage
  modified_base 19: mod_base = OTHER; note = 2'-O-methoxyethyl 5-methylcytosine with phosphorothioate linkage
  modified_base 20: mod_base = OTHER; note = 2'-O-methoxyethyl modified nucleotide
  misc_feature 1..6: note = RNA
  misc_feature 7..15: note = DNA
  misc_feature 16..20: note = RNA
cagaggtgaagcgaagtgca

SEQ ID NO: 498 - DNA, 20 bp, synthetic construct
  source 1..20: mol_type = other DNA
  modified_base 1: mod_base = OTHER; note = 2'-O-methoxyethyl 5-methylcytosine with phosphorothioate linkage
  modified_base 2: mod_base = OTHER; note = 2'-O-methoxyethyl modified nucleotide with phosphorothioate linkage
  modified_base 3: mod_base = OTHER; note = Locked nucleic acid with phosphorothioate linkage
  modified_base 4: mod_base = OTHER; note = 2'-O-methoxyethyl modified nucleotide with phosphorothioate linkage
  modified_base 5: mod_base = OTHER; note = 2'-O-methoxyethyl modified nucleotide with phosphorothioate linkage
  modified_base 6: mod_base = OTHER; note = Nucleotide with phosphorothioate linkage
  modified_base 7: mod_base = OTHER; note = Thymine with phosphorothioate linkage
  modified_base 8: mod_base = OTHER; note = 2'-O-methylcyclopropyl modified nucleotide with phosphorothioate linkage
  modified_base 9: mod_base = OTHER; note = Nucleotide with phosphorothioate linkage
  modified_base 10: mod_base = OTHER; note = Nucleotide with phosphorothioate linkage
  modified_base 11: mod_base = OTHER; note = Nucleotide with phosphorothioate linkage
  modified_base 12: mod_base = OTHER; note = 5-methylcytosine with phosphorothioate linkage
  modified_base 13: mod_base = OTHER; note = Nucleotide with phosphorothioate linkage
  modified_base 14: mod_base = OTHER; note = Nucleotide with phosphorothioate linkage
  modified_base 15: mod_base = OTHER; note = Nucleotide with phosphorothioate linkage
  modified_base 16: mod_base = OTHER; note = 2'-O-methoxyethyl modified nucleotide with phosphorothioate linkage
  modified_base 17: mod_base = OTHER; note = 2'-O-methoxyethyl modified thymine with phosphorothioate linkage
  modified_base 18: mod_base = OTHER; note = Locked nucleic acid with phosphorothioate linkage
  modified_base 19: mod_base = OTHER; note = 2'-O-methoxyethyl 5-methylcytosine with phosphorothioate linkage
  modified_base 20: mod_base = OTHER; note = 2'-O-methoxyethyl modified nucleotide
  misc_feature 1..5: note = RNA
  misc_feature 6..7: note = DNA
  misc_feature 8: note = RNA
  misc_feature 9..15: note = DNA
  misc_feature 16..20: note = RNA
cagaggtgaagcgaagtgca

SEQ ID NO: 499 - DNA, 20 bp, synthetic construct
  source 1..20: mol_type = other DNA
  modified_base 1: mod_base = OTHER; note = 2'-O-methoxyethyl 5-methylcytosine with phosphorothioate linkage
  modified_base 2: mod_base = OTHER; note = 2'-O-methoxyethyl modified nucleotide with phosphorothioate linkage
  modified_base 3: mod_base = OTHER; note = Locked nucleic acid with phosphorothioate linkage
  modified_base 4: mod_base = OTHER; note = 2'-O-methoxyethyl modified nucleotide with phosphorothioate linkage
  modified_base 5: mod_base = OTHER; note = 2'-O-methoxyethyl modified nucleotide with phosphorothioate linkage
  modified_base 6: mod_base = OTHER; note = 2'-O-methylcyclopropyl modified nucleotide with phosphorothioate linkage
  modified_base 7: mod_base = OTHER; note = Thymine with phosphorothioate linkage
  modified_base 8: mod_base = OTHER; note = 2'-O-methylcyclopropyl modified nucleotide with phosphorothioate linkage
  modified_base 9: mod_base = OTHER; note = Nucleotide with phosphorothioate linkage
  modified_base 10: mod_base = OTHER; note = Nucleotide with phosphorothioate linkage
  modified_base 11: mod_base = OTHER; note = Nucleotide with phosphorothioate linkage
  modified_base 12: mod_base = OTHER; note = 5-methylcytosine with phosphorothioate linkage
  modified_base 13: mod_base = OTHER; note = Nucleotide with phosphorothioate linkage
  modified_base 14: mod_base = OTHER; note = Nucleotide with phosphorothioate linkage
  modified_base 15: mod_base = OTHER; note = Nucleotide with phosphorothioate linkage
  modified_base 16: mod_base = OTHER; note = 2'-O-methoxyethyl modified nucleotide with phosphorothioate linkage
  modified_base 17: mod_base = OTHER; note = 2'-O-methoxyethyl modified thymine with phosphorothioate linkage
  modified_base 18: mod_base = OTHER; note = Locked nucleic acid with phosphorothioate linkage
  modified_base 19: mod_base = OTHER; note = 2'-O-methoxyethyl 5-methylcytosine with phosphorothioate linkage
  modified_base 20: mod_base = OTHER; note = 2'-O-methoxyethyl modified nucleotide
  misc_feature 1..6: note = RNA
  misc_feature 7: note = DNA
  misc_feature 8: note = RNA
  misc_feature 9..15: note = DNA
  misc_feature 16..20: note = RNA
cagaggtgaagcgaagtgca

SEQ ID NO: 500 - DNA, 20 bp, synthetic construct
  source 1..20: mol_type = other DNA
  modified_base 1: mod_base = OTHER; note = 2'-O-methoxyethyl 5-methylcytosine with phosphorothioate linkage
  modified_base 2: mod_base = OTHER; note = 2'-O-methoxyethyl modified nucleotide with phosphorothioate linkage
  modified_base 3: mod_base = OTHER; note = 2'-O-methoxyethyl modified nucleotide with phosphorothioate linkage
  modified_base 4: mod_base = OTHER; note = 2'-O-methoxyethyl modified nucleotide with phosphorothioate linkage
  modified_base 5: mod_base = OTHER; note = 2'-O-methoxyethyl modified nucleotide with phosphorothioate linkage
  modified_base 6: mod_base = OTHER; note = Nucleotide with phosphorothioate linkage
  modified_base 7: mod_base = OTHER; note = Thymine with phosphorothioate linkage
  modified_base 8: mod_base = OTHER; note = Nucleotide with phosphorothioate linkage
  modified_base 9: mod_base = OTHER; note = Nucleotide with phosphorothioate linkage
  modified_base 10: mod_base = OTHER; note = Nucleotide with phosphorothioate linkage
  modified_base 11: mod_base = OTHER; note = Nucleotide with phosphorothioate linkage
  modified_base 12: mod_base = OTHER; note = 5-methylcytosine with phosphorothioate linkage
  modified_base 13: mod_base = OTHER; note = Nucleotide with phosphorothioate linkage
  modified_base 14: mod_base = OTHER; note = Nucleotide with phosphorothioate linkage
  modified_base 15: mod_base = OTHER; note = Nucleotide with phosphorothioate linkage
  modified_base 16: mod_base = OTHER; note = 2'-O-methoxyethyl modified nucleotide with phosphorothioate linkage
  modified_base 17: mod_base = OTHER; note = 2'-O-methoxyethyl modified thymine with phosphorothioate linkage
  modified_base 18: mod_base = OTHER; note = 2'-O-methoxyethyl modified nucleotide with phosphorothioate linkage
  modified_base 19: mod_base = OTHER; note = 2'-O-cyclopropyl modified 5-methylcytosine with phosphorothioate linkage
  modified_base 20: mod_base = OTHER; note = 2'-O-methoxyethyl modified nucleotide
  misc_feature 1..5: note = RNA
  misc_feature 6..15: note = DNA
  misc_feature 16..20: note = RNA
cagaggtgaagcgaagtgca

SEQ ID NO: 501 - DNA, 20 bp, synthetic construct
  source 1..20: mol_type = other DNA
  modified_base 1: mod_base = OTHER; note = 2'-O-methoxyethyl 5-methylcytosine with phosphorothioate linkage
  modified_base 2: mod_base = OTHER; note = 2'-O-methoxyethyl modified nucleotide with phosphorothioate linkage
  modified_base 3: mod_base = OTHER; note = 2'-O-methoxyethyl modified nucleotide with phosphorothioate linkage
  modified_base 4: mod_base = OTHER; note = 2'-O-methoxyethyl modified nucleotide with phosphorothioate linkage
  modified_base 5: mod_base = OTHER; note = 2'-O-methoxyethyl modified nucleotide with phosphorothioate linkage
  modified_base 6: mod_base = OTHER; note = Nucleotide with phosphorothioate linkage
  modified_base 7: mod_base = OTHER; note = Thymine with phosphorothioate linkage
  modified_base 8: mod_base = OTHER; note = Nucleotide with phosphorothioate linkage
  modified_base 9: mod_base = OTHER; note = Nucleotide with phosphorothioate linkage
  modified_base 10: mod_base = OTHER; note = Nucleotide with phosphorothioate linkage
  modified_base 11: mod_base = OTHER; note = Nucleotide with phosphorothioate linkage
  modified_base 12: mod_base = OTHER; note = 5-methylcytosine with phosphorothioate linkage
  modified_base 13: mod_base = OTHER; note = Nucleotide with phosphorothioate linkage
  modified_base 14: mod_base = OTHER; note = Nucleotide with phosphorothioate linkage
  modified_base 15: mod_base = OTHER; note = Nucleotide with phosphorothioate linkage
  modified_base 16: mod_base = OTHER; note = 2'-O-methoxyethyl modified nucleotide with phosphorothioate linkage
  modified_base 17: mod_base = OTHER; note = 2'-O-cyclopropyl modified thymine with phosphorothioate linkage
  modified_base 18: mod_base = OTHER; note = 2'-O-methoxyethyl modified nucleotide with phosphorothioate linkage
  modified_base 19: mod_base = OTHER; note = 2'-O-cyclopropyl modified 5-methylcytosine with phosphorothioate linkage
  modified_base 20: mod_base = OTHER; note = 2'-O-methoxyethyl modified nucleotide
  misc_feature 1..5: note = RNA
  misc_feature 6..15: note = DNA
  misc_feature 16..20: note = RNA
cagaggtgaagcgaagtgca

SEQ ID NO: 502 - DNA, 20 bp, synthetic construct
  source 1..20: mol_type = other DNA
  modified_base 1: mod_base = OTHER; note = 2'-O-cyclopropyl modified 5-methylcytosine with phosphorothioate linkage
  modified_base 2: mod_base = OTHER; note = 2'-O-methoxyethyl modified nucleotide with phosphorothioate linkage
  modified_base 3: mod_base = OTHER; note = 2'-O-methoxyethyl modified nucleotide with phosphorothioate linkage
  modified_base 4: mod_base = OTHER; note = 2'-O-methoxyethyl modified nucleotide with phosphorothioate linkage
  modified_base 5: mod_base = OTHER; note = 2'-O-methoxyethyl modified nucleotide with phosphorothioate linkage
  modified_base 6: mod_base = OTHER; note = Nucleotide with phosphorothioate linkage
  modified_base 7: mod_base = OTHER; note = Thymine with phosphorothioate linkage
  modified_base 8: mod_base = OTHER; note = Nucleotide with phosphorothioate linkage
  modified_base 9: mod_base = OTHER; note = Nucleotide with phosphorothioate linkage
  modified_base 10: mod_base = OTHER; note = Nucleotide with phosphorothioate linkage
  modified_base 11: mod_base = OTHER; note = Nucleotide with phosphorothioate linkage
  modified_base 12: mod_base = OTHER; note = 5-methylcytosine with phosphorothioate linkage
  modified_base 13: mod_base = OTHER; note = Nucleotide with phosphorothioate linkage
  modified_base 14: mod_base = OTHER; note = Nucleotide with phosphorothioate linkage
  modified_base 15: mod_base = OTHER; note = Nucleotide with phosphorothioate linkage
  modified_base 16: mod_base = OTHER; note = 2'-O-methoxyethyl modified nucleotide with phosphorothioate linkage
  modified_base 17: mod_base = OTHER; note = 2'-O-cyclopropyl modified thymine with phosphorothioate linkage
  modified_base 18: mod_base = OTHER; note = 2'-O-methoxyethyl modified nucleotide with phosphorothioate linkage
  modified_base 19: mod_base = OTHER; note = 2'-O-methoxyethyl 5-methylcytosine with phosphorothioate linkage
  modified_base 20: mod_base = OTHER; note = 2'-O-methoxyethyl modified nucleotide
  misc_feature 1..5: note = RNA
  misc_feature 6..15: note = DNA
  misc_feature 16..20: note = RNA
cagaggtgaagcgaagtgca

SEQ ID NO: 503 - DNA, 20 bp, synthetic construct
  source 1..20: mol_type = other DNA
  modified_base 1: mod_base = OTHER; note = 2'-O-cyclopropyl modified 5-methylcytosine with phosphorothioate linkage
  modified_base 2: mod_base = OTHER; note = 2'-O-methoxyethyl modified nucleotide with phosphorothioate linkage
  modified_base 3: mod_base = OTHER; note = 2'-O-methoxyethyl modified nucleotide with phosphorothioate linkage
  modified_base 4: mod_base = OTHER; note = 2'-O-methoxyethyl modified nucleotide with phosphorothioate linkage
  modified_base 5: mod_base = OTHER; note = 2'-O-methoxyethyl modified nucleotide with phosphorothioate linkage
  modified_base 6: mod_base = OTHER; note = Nucleotide with phosphorothioate linkage
  modified_base 7: mod_base = OTHER; note = Thymine with phosphorothioate linkage
  modified_base 8: mod_base = OTHER; note = Nucleotide with phosphorothioate linkage
  modified_base 9: mod_base = OTHER; note = Nucleotide with phosphorothioate linkage
  modified_base 10: mod_base = OTHER; note = Nucleotide with phosphorothioate linkage
  modified_base 11: mod_base = OTHER; note = Nucleotide with phosphorothioate linkage
  modified_base 12: mod_base = OTHER; note = 5-methylcytosine with phosphorothioate linkage
  modified_base 13: mod_base = OTHER; note = Nucleotide with phosphorothioate linkage
  modified_base 14: mod_base = OTHER; note = Nucleotide with phosphorothioate linkage
  modified_base 15: mod_base = OTHER; note = Nucleotide with phosphorothioate linkage
  modified_base 16: mod_base = OTHER; note = 2'-O-methoxyethyl modified nucleotide with phosphorothioate linkage
  modified_base 17: mod_base = OTHER; note = 2'-O-methoxyethyl modified thymine with phosphorothioate linkage
  modified_base 18: mod_base = OTHER; note = 2'-O-methoxyethyl modified nucleotide with phosphorothioate linkage
  modified_base 19: mod_base = OTHER; note = 2'-O-cyclopropyl modified 5-methylcytosine with phosphorothioate linkage
  modified_base 20: mod_base = OTHER; note = 2'-O-methoxyethyl modified nucleotide
  misc_feature 1..5: note = RNA
  misc_feature 6..15: note = DNA
  misc_feature 16..20: note = RNA
cagaggtgaagcgaagtgca

SEQ ID NO: 504 - DNA, 20 bp, synthetic construct
  source 1..20: mol_type = other DNA
  modified_base 1: mod_base = OTHER; note = 2'-O-methoxyethyl 5-methylcytosine with phosphorothioate linkage
  modified_base 2: mod_base = OTHER; note = 2'-O-cyclopropyl modified nucleotide with phosphorothioate linkage
  modified_base 3: mod_base = OTHER; note = 2'-O-methoxyethyl modified nucleotide with phosphorothioate linkage
  modified_base 4: mod_base = OTHER; note = 2'-O-cyclopropyl modified nucleotide with phosphorothioate linkage
  modified_base 5: mod_base = OTHER; note = 2'-O-methoxyethyl modified nucleotide with phosphorothioate linkage
  modified_base 6: mod_base = OTHER; note = Nucleotide with phosphorothioate linkage
  modified_base 7: mod_base = OTHER; note = Thymine with phosphorothioate linkage
  modified_base 8: mod_base = OTHER; note = Nucleotide with phosphorothioate linkage
  modified_base 9: mod_base = OTHER; note = Nucleotide with phosphorothioate linkage
  modified_base 10: mod_base = OTHER; note = Nucleotide with phosphorothioate linkage
  modified_base 11: mod_base = OTHER; note = Nucleotide with phosphorothioate linkage
  modified_base 12: mod_base = OTHER; note = 5-methylcytosine with phosphorothioate linkage
  modified_base 13: mod_base = OTHER; note = Nucleotide with phosphorothioate linkage
  modified_base 14: mod_base = OTHER; note = Nucleotide with phosphorothioate linkage
  modified_base 15: mod_base = OTHER; note = Nucleotide with phosphorothioate linkage
  modified_base 16: mod_base = OTHER; note = 2'-O-methoxyethyl modified nucleotide with phosphorothioate linkage
  modified_base 17: mod_base = OTHER; note = 2'-O-methoxyethyl modified thymine with phosphorothioate linkage
  modified_base 18: mod_base = OTHER; note = 2'-O-methoxyethyl modified nucleotide with phosphorothioate linkage
  modified_base 19: mod_base = OTHER; note = 2'-O-methoxyethyl 5-methylcytosine with phosphorothioate linkage
  modified_base 20: mod_base = OTHER; note = 2'-O-methoxyethyl modified nucleotide
  misc_feature 1..5: note = RNA
  misc_feature 6..15: note = DNA
  misc_feature 16..20: note = RNA
cagaggtgaagcgaagtgca

SEQ ID NO: 505 - DNA, 20 bp, synthetic construct
  source 1..20: mol_type = other DNA
  modified_base 1: mod_base = OTHER; note = 2'-O-methoxyethyl 5-methylcytosine with phosphorothioate linkage
  modified_base 2: mod_base = OTHER; note = 2'-O-cyclopropyl modified nucleotide with phosphorothioate linkage
  modified_base 3: mod_base = OTHER; note = 2'-O-methoxyethyl modified nucleotide with phosphorothioate linkage
  modified_base 4: mod_base = OTHER; note = 2'-O-methoxyethyl modified nucleotide with phosphorothioate linkage
  modified_base 5: mod_base = OTHER; note = 2'-O-methoxyethyl modified nucleotide with phosphorothioate linkage
  modified_base 6: mod_base = OTHER; note = Nucleotide with phosphorothioate linkage
  modified_base 7: mod_base = OTHER; note = Thymine with phosphorothioate linkage
  modified_base 8: mod_base = OTHER; note = Nucleotide with phosphorothioate linkage
  modified_base 9: mod_base = OTHER; note = Nucleotide with phosphorothioate linkage
  modified_base 10: mod_base = OTHER; note = Nucleotide with phosphorothioate linkage
  modified_base 11: mod_base = OTHER; note = Nucleotide with phosphorothioate linkage
  modified_base 12: mod_base = OTHER; note = 5-methylcytosine with phosphorothioate linkage
  modified_base 13: mod_base = OTHER; note = Nucleotide with phosphorothioate linkage
  modified_base 14: mod_base = OTHER; note = Nucleotide with phosphorothioate linkage
  modified_base 15: mod_base = OTHER; note = Nucleotide with phosphorothioate linkage
  modified_base 16: mod_base = OTHER; note = 2'-O-methoxyethyl modified nucleotide with phosphorothioate linkage
  modified_base 17: mod_base = OTHER; note = 2'-O-methoxyethyl modified thymine with phosphorothioate linkage
  modified_base 18: mod_base = OTHER; note = 2'-O-methoxyethyl modified nucleotide with phosphorothioate linkage
  modified_base 19: mod_base = OTHER; note = 2'-O-methoxyethyl 5-methylcytosine with phosphorothioate linkage
  modified_base 20: mod_base = OTHER; note = 2'-O-cyclopropyl modified nucleotide
  misc_feature 1..5: note = RNA
  misc_feature 6..15: note = DNA
  misc_feature 16..20: note = RNA
cagaggtgaagcgaagtgca

SEQ ID NO: 506 - DNA, 20 bp, synthetic construct
  source 1..20: mol_type = other DNA
  modified_base 1: mod_base = OTHER; note = 2'-O-methoxyethyl 5-methylcytosine with phosphorothioate linkage
  modified_base 2: mod_base = OTHER; note = 2'-O-methoxyethyl modified nucleotide with phosphorothioate linkage
  modified_base 3: mod_base = OTHER; note = 2'-O-methoxyethyl modified nucleotide with phosphorothioate linkage
  modified_base 4: mod_base = OTHER; note = 2'-O-cyclopropyl modified nucleotide with phosphorothioate linkage
  modified_base 5: mod_base = OTHER; note = 2'-O-methoxyethyl modified nucleotide with phosphorothioate linkage
  modified_base 6: mod_base = OTHER; note = Nucleotide with phosphorothioate linkage
  modified_base 7: mod_base = OTHER; note = Thymine with phosphorothioate linkage
  modified_base 8: mod_base = OTHER; note = Nucleotide with phosphorothioate linkage
  modified_base 9: mod_base = OTHER; note = Nucleotide with phosphorothioate linkage
  modified_base 10: mod_base = OTHER; note = Nucleotide with phosphorothioate linkage
  modified_base 11: mod_base = OTHER; note = Nucleotide with phosphorothioate linkage
  modified_base 12: mod_base = OTHER; note = 5-methylcytosine with phosphorothioate linkage
  modified_base 13: mod_base = OTHER; note = Nucleotide with phosphorothioate linkage
  modified_base 14: mod_base = OTHER; note = Nucleotide with phosphorothioate linkage
  modified_base 15: mod_base = OTHER; note = Nucleotide with phosphorothioate linkage
  modified_base 16: mod_base = OTHER; note = 2'-O-methoxyethyl modified nucleotide with phosphorothioate linkage
  modified_base 17: mod_base = OTHER; note = 2'-O-methoxyethyl modified thymine with phosphorothioate linkage
  modified_base 18: mod_base = OTHER; note = 2'-O-methoxyethyl modified nucleotide with phosphorothioate linkage
  modified_base 19: mod_base = OTHER; note = 2'-O-methoxyethyl 5-methylcytosine with phosphorothioate linkage
  modified_base 20: mod_base = OTHER; note = 2'-O-cyclopropyl modified nucleotide
  misc_feature 1..5: note = RNA
  misc_feature 6..15: note = DNA
  misc_feature 16..20: note = RNA
cagaggtgaagcgaagtgca

SEQ ID NO: 507 - DNA, 20 bp, synthetic construct
  source 1..20: mol_type = other DNA
  modified_base 1: mod_base = OTHER; note = 2'-O-methoxyethyl 5-methylcytosine with phosphorothioate linkage
  modified_base 2: mod_base = OTHER; note = 2'-O-methoxyethyl modified nucleotide with phosphorothioate linkage
  modified_base 3: mod_base = OTHER; note = 2'-O-cyclopropyl modified nucleotide with phosphorothioate linkage
  modified_base 4: mod_base = OTHER; note = 2'-O-methoxyethyl modified nucleotide with phosphorothioate linkage
  modified_base 5: mod_base = OTHER; note = 2'-O-cyclopropyl modified nucleotide with phosphorothioate linkage
  modified_base 6: mod_base = OTHER; note = Nucleotide with phosphorothioate linkage
  modified_base 7: mod_base = OTHER; note = Thymine with phosphorothioate linkage
  modified_base 8: mod_base = OTHER; note = Nucleotide with phosphorothioate linkage
  modified_base 9: mod_base = OTHER; note = Nucleotide with phosphorothioate linkage
  modified_base 10: mod_base = OTHER; note = Nucleotide with phosphorothioate linkage
  modified_base 11: mod_base = OTHER; note = Nucleotide with phosphorothioate linkage
  modified_base 12: mod_base = OTHER; note = 5-methylcytosine with phosphorothioate linkage
  modified_base 13: mod_base = OTHER; note = Nucleotide with phosphorothioate linkage
  modified_base 14: mod_base = OTHER; note = Nucleotide with phosphorothioate linkage
  modified_base 15: mod_base = OTHER; note = Nucleotide with phosphorothioate linkage
  modified_base 16: mod_base = OTHER; note = 2'-O-methoxyethyl modified nucleotide with phosphorothioate linkage
  modified_base 17: mod_base = OTHER; note = 2'-O-methoxyethyl modified thymine with phosphorothioate linkage
  modified_base 18: mod_base = OTHER; note = 2'-O-methoxyethyl modified nucleotide with phosphorothioate linkage
  modified_base 19: mod_base = OTHER; note = 2'-O-methoxyethyl 5-methylcytosine with phosphorothioate linkage
  modified_base 20: mod_base = OTHER; note = 2'-O-methoxyethyl modified nucleotide
  misc_feature 1..5: note = RNA
  misc_feature 6..15: note = DNA
  misc_feature 16..20: note = RNA
cagaggtgaagcgaagtgca

SEQ ID NO: 508 - DNA, 20 bp, synthetic construct
  source 1..20: mol_type = other DNA
  modified_base 1: mod_base = OTHER; note = 2'-O-methoxyethyl 5-methylcytosine with phosphorothioate linkage
  modified_base 2: mod_base = OTHER; note = 2'-O-methoxyethyl modified nucleotide with phosphorothioate linkage
  modified_base 3: mod_base = OTHER; note = 2'-O-methoxyethyl modified nucleotide with phosphorothioate linkage
  modified_base 4: mod_base = OTHER; note = 2'-O-methoxyethyl modified nucleotide with phosphorothioate linkage
  modified_base 5: mod_base = OTHER; note = 2'-O-methoxyethyl modified nucleotide with phosphorothioate linkage
  modified_base 6: mod_base = OTHER; note = Nucleotide with phosphorothioate linkage
  modified_base 7: mod_base = OTHER; note = Thymine with phosphorothioate linkage
  modified_base 8: mod_base = OTHER; note = Nucleotide with phosphorothioate linkage
  modified_base 9: mod_base = OTHER; note = Nucleotide with phosphorothioate linkage
  modified_base 10: mod_base = OTHER; note = Nucleotide with phosphorothioate linkage
  modified_base 11: mod_base = OTHER; note = Nucleotide with phosphorothioate linkage
  modified_base 12: mod_base = OTHER; note = 5-methylcytosine with phosphorothioate linkage
  modified_base 13: mod_base = OTHER; note = Nucleotide with phosphorothioate linkage
  modified_base 14: mod_base = OTHER; note = Nucleotide with phosphorothioate linkage
  modified_base 15: mod_base = OTHER; note = Nucleotide with phosphorothioate linkage
  modified_base 16: mod_base = OTHER; note = 2'-O-cyclopropyl modified nucleotide with phosphorothioate linkage
  modified_base 17: mod_base = OTHER; note = 2'-O-methoxyethyl modified thymine with phosphorothioate linkage
  modified_base 18: mod_base = OTHER; note = 2'-O-cyclopropyl modified nucleotide with phosphorothioate linkage
  modified_base 19: mod_base = OTHER; note = 2'-O-methoxyethyl 5-methylcytosine with phosphorothioate linkage
  modified_base 20: mod_base = OTHER; note = 2'-O-methoxyethyl modified nucleotide
  misc_feature 1..5: note = RNA
  misc_feature 6..15: note = DNA
  misc_feature 16..20: note = RNA
cagaggtgaagcgaagtgca

SEQ ID NO: 509 - DNA, 20 bp, synthetic construct
  source 1..20: mol_type = other DNA
  modified_base 1: mod_base = OTHER; note = 2'-O-methoxyethyl 5-methylcytosine with phosphorothioate linkage
  modified_base 2: mod_base = OTHER; note = 2'-O-methoxyethyl modified nucleotide with phosphorothioate linkage
  modified_base 3: mod_base = OTHER; note = 2'-O-cyclopropyl modified nucleotide with phosphorothioate linkage
  modified_base 4: mod_base = OTHER; note = 2'-O-methoxyethyl modified nucleotide with phosphorothioate linkage
  modified_base 5: mod_base = OTHER; note = 2'-O-methoxyethyl modified nucleotide with phosphorothioate linkage
  modified_base 6: mod_base = OTHER; note = Nucleotide with phosphorothioate linkage
  modified_base 7: mod_base = OTHER; note = Thymine with phosphorothioate linkage
  modified_base 8: mod_base = OTHER; note = Nucleotide with phosphorothioate linkage
  modified_base 9: mod_base = OTHER; note = Nucleotide with phosphorothioate linkage
  modified_base 10: mod_base = OTHER; note = Nucleotide with phosphorothioate linkage
  modified_base 11: mod_base = OTHER; note = Nucleotide with phosphorothioate linkage
  modified_base 12: mod_base = OTHER; note = 5-methylcytosine with phosphorothioate linkage
  modified_base 13: mod_base = OTHER; note = Nucleotide with phosphorothioate linkage
  modified_base 14: mod_base = OTHER; note = Nucleotide with phosphorothioate linkage
  modified_base 15: mod_base = OTHER; note = Nucleotide with phosphorothioate linkage
  modified_base 16: mod_base = OTHER; note = 2'-O-cyclopropyl modified nucleotide with phosphorothioate linkage
  modified_base 17: mod_base = OTHER; note = 2'-O-methoxyethyl modified thymine with phosphorothioate linkage
  modified_base 18: mod_base = OTHER; note = 2'-O-methoxyethyl modified nucleotide with phosphorothioate linkage
  modified_base 19: mod_base = OTHER; note = 2'-O-methoxyethyl 5-methylcytosine with phosphorothioate linkage
  modified_base 20: mod_base = OTHER; note = 2'-O-methoxyethyl modified nucleotide
  misc_feature 1..5: note = RNA
  misc_feature 6..15: note = DNA
  misc_feature 16..20: note = RNA
cagaggtgaagcgaagtgca

SEQ ID NO: 510 - DNA, 20 bp, synthetic construct
  source 1..20: mol_type = other DNA
  modified_base 1: mod_base = OTHER; note = 2'-O-methoxyethyl 5-methylcytosine with phosphorothioate linkage
  modified_base 2: mod_base = OTHER; note = 2'-O-methoxyethyl modified nucleotide with phosphorothioate linkage
  modified_base 3: mod_base = OTHER; note = 2'-O-cyclopropyl modified nucleotide with phosphorothioate linkage
  modified_base 4: mod_base = OTHER; note = 2'-O-methoxyethyl modified nucleotide with phosphorothioate linkage
  modified_base 5: mod_base = OTHER; note = 2'-O-methoxyethyl modified nucleotide with phosphorothioate linkage
  modified_base 6: mod_base = OTHER; note = Nucleotide with phosphorothioate linkage
  modified_base 7: mod_base = OTHER; note = Thymine with phosphorothioate linkage
  modified_base 8: mod_base = OTHER; note = Nucleotide with phosphorothioate linkage
  modified_base 9: mod_base = OTHER; note = Nucleotide with phosphorothioate linkage
  modified_base 10: mod_base = OTHER; note = Nucleotide with phosphorothioate linkage
  modified_base 11: mod_base = OTHER; note = Nucleotide with phosphorothioate linkage
  modified_base 12: mod_base = OTHER; note = 5-methylcytosine with phosphorothioate linkage
  modified_base 13: mod_base = OTHER; note = Nucleotide with phosphorothioate linkage
  modified_base 14: mod_base = OTHER; note = Nucleotide with phosphorothioate linkage
  modified_base 15: mod_base = OTHER; note = Nucleotide with phosphorothioate linkage
  modified_base 16: mod_base = OTHER; note = 2'-O-methoxyethyl modified nucleotide with phosphorothioate linkage
  modified_base 17: mod_base = OTHER; note = 2'-O-methoxyethyl modified thymine with phosphorothioate linkage
  modified_base 18: mod_base = OTHER; note = 2'-O-cyclopropyl modified nucleotide with phosphorothioate linkage
  modified_base 19: mod_base = OTHER; note = 2'-O-methoxyethyl 5-methylcytosine with phosphorothioate linkage
  modified_base 20: mod_base = OTHER; note = 2'-O-methoxyethyl modified nucleotide
  misc_feature 1..5: note = RNA
  misc_feature 6..15: note = DNA
  misc_feature 16..20: note = RNA
cagaggtgaagcgaagtgca

SEQ ID NO: 511 - DNA, 20 bp, synthetic construct
  source 1..20: mol_type = other DNA
  modified_base 1: mod_base = OTHER; note = 2'-O-methoxyethyl 5-methylcytosine with phosphorothioate linkage
  modified_base 2: mod_base = OTHER; note = 2'-O-methoxyethyl modified nucleotide with phosphorothioate linkage
  modified_base 3: mod_base = OTHER; note = 2'-O-methoxyethyl modified nucleotide with phosphorothioate linkage
  modified_base 4: mod_base = OTHER; note = 2'-O-methoxyethyl modified nucleotide with phosphorothioate linkage
  modified_base 5: mod_base = OTHER; note = 2'-O-cyclopropyl modified nucleotide with phosphorothioate linkage
  modified_base 6: mod_base = OTHER; note = Nucleotide with phosphorothioate linkage
  modified_base 7: mod_base = OTHER; note = Thymine with phosphorothioate linkage
  modified_base 8: mod_base = OTHER; note = Nucleotide with phosphorothioate linkage
  modified_base 9: mod_base = OTHER; note = Nucleotide with phosphorothioate linkage
  modified_base 10: mod_base = OTHER; note = Nucleotide with phosphorothioate linkage
  modified_base 11: mod_base = OTHER; note = Nucleotide with phosphorothioate linkage
  modified_base 12: mod_base = OTHER; note = 5-methylcytosine with phosphorothioate linkage
  modified_base 13: mod_base = OTHER; note = Nucleotide with phosphorothioate linkage
  modified_base 14: mod_base = OTHER; note = Nucleotide with phosphorothioate linkage
  modified_base 15: mod_base = OTHER; note = Nucleotide with phosphorothioate linkage
  modified_base 16: mod_base = OTHER; note = 2'-O-cyclopropyl modified nucleotide with phosphorothioate linkage
  modified_base 17: mod_base = OTHER; note = 2'-O-methoxyethyl modified thymine with phosphorothioate linkage
  modified_base 18: mod_base = OTHER; note = 2'-O-methoxyethyl modified nucleotide with phosphorothioate linkage
  modified_base 19: mod_base = OTHER; note = 2'-O-methoxyethyl 5-methylcytosine with phosphorothioate linkage
  modified_base 20: mod_base = OTHER; note = 2'-O-methoxyethyl modified nucleotide
  misc_feature 1..5: note = RNA
  misc_feature 6..15: note = DNA
  misc_feature 16..20: note = RNA
cagaggtgaagcgaagtgca

SEQ ID NO: 512 - DNA, 20 bp, synthetic construct
  source 1..20: mol_type = other DNA
  modified_base 1: mod_base = OTHER; note = 2'-O-methoxyethyl 5-methylcytosine with phosphorothioate linkage
  modified_base 2: mod_base = OTHER; note = 2'-O-methoxyethyl modified nucleotide with phosphorothioate linkage
  modified_base 3: mod_base = OTHER; note = 2'-O-methoxyethyl modified nucleotide with phosphorothioate linkage
  modified_base 4: mod_base = OTHER; note = 2'-O-methoxyethyl modified nucleotide with phosphorothioate linkage
  modified_base 5: mod_base = OTHER; note = 2'-O-cyclopropyl modified nucleotide with phosphorothioate linkage
  modified_base 6: mod_base = OTHER; note = Nucleotide with phosphorothioate linkage
  modified_base 7: mod_base = OTHER; note = Thymine with phosphorothioate linkage
  modified_base 8: mod_base = OTHER; note = Nucleotide with phosphorothioate linkage
  modified_base 9: mod_base = OTHER; note = Nucleotide with phosphorothioate linkage
  modified_base 10: mod_base = OTHER; note = Nucleotide with phosphorothioate linkage
  modified_base 11: mod_base = OTHER; note = Nucleotide with phosphorothioate linkage
  modified_base 12: mod_base = OTHER; note = 5-methylcytosine with phosphorothioate linkage
  modified_base 13: mod_base = OTHER; note = Nucleotide with phosphorothioate linkage
  modified_base 14: mod_base = OTHER; note = Nucleotide with phosphorothioate linkage
  modified_base 15: mod_base = OTHER; note = Nucleotide with phosphorothioate linkage
  modified_base 16: mod_base = OTHER; note = 2'-O-methoxyethyl modified nucleotide with phosphorothioate linkage
  modified_base 17: mod_base = OTHER; note = 2'-O-methoxyethyl modified thymine with phosphorothioate linkage
  modified_base 18: mod_base = OTHER; note = 2'-O-cyclopropyl modified nucleotide with phosphorothioate linkage
  modified_base 19: mod_base = OTHER; note = 2'-O-methoxyethyl 5-methylcytosine with phosphorothioate linkage
  modified_base 20: mod_base = OTHER; note = 2'-O-methoxyethyl modified nucleotide
  misc_feature 1..5: note = RNA
  misc_feature 6..15: note = DNA
  misc_feature 16..20: note = RNA
cagaggtgaagcgaagtgca

SEQ ID NO: 513 - DNA, 20 bp, synthetic construct
  source 1..20: mol_type = other DNA
  modified_base 1: mod_base = OTHER; note = 2'-O-methoxyethyl 5-methylcytosine with phosphorothioate linkage
  modified_base 2: mod_base = OTHER; note = 2'-O-cyclopropyl modified nucleotide with phosphorothioate linkage
  modified_base 3: mod_base = OTHER; note = 2'-O-cyclopropyl modified nucleotide with phosphorothioate linkage
  modified_base 4: mod_base = OTHER; note = 2'-O-methoxyethyl modified nucleotide with phosphorothioate linkage
  modified_base 5: mod_base = OTHER; note = 2'-O-cyclopropyl modified nucleotide with phosphorothioate linkage
  modified_base 6: mod_base = OTHER; note = Nucleotide with phosphorothioate linkage
  modified_base 7: mod_base = OTHER; note = Thymine with phosphorothioate linkage
  modified_base 8: mod_base = OTHER; note = Nucleotide with phosphorothioate linkage
  modified_base 9: mod_base = OTHER; note = Nucleotide with phosphorothioate linkage
  modified_base 10: mod_base = OTHER; note = Nucleotide with phosphorothioate linkage
  modified_base 11: mod_base = OTHER; note = Nucleotide with phosphorothioate linkage
  modified_base 12: mod_base = OTHER; note = 5-methylcytosine with phosphorothioate linkage
  modified_base 13: mod_base = OTHER; note = Nucleotide with phosphorothioate linkage
  modified_base 14: mod_base = OTHER; note = Nucleotide with phosphorothioate linkage
  modified_base 15: mod_base = OTHER; note = Nucleotide with phosphorothioate linkage
  modified_base 16: mod_base = OTHER; note = 2'-O-methoxyethyl modified nucleotide with phosphorothioate linkage
  modified_base 17: mod_base = OTHER; note = 2'-O-methoxyethyl modified thymine with phosphorothioate linkage
  modified_base 18: mod_base = OTHER; note = 2'-O-methoxyethyl modified nucleotide with phosphorothioate linkage
  modified_base 19: mod_base = OTHER; note = 2'-O-methoxyethyl 5-methylcytosine with phosphorothioate linkage
  modified_base 20: mod_base = OTHER; note = 2'-O-methoxyethyl modified nucleotide
  misc_feature 1..5: note = RNA
  misc_feature 6..15: note = DNA
  misc_feature 16..20: note = RNA
cagaggtgaagcgaagtgca

SEQ ID NO: 514 - DNA, 20 bp, synthetic construct
  source 1..20: mol_type = other DNA
  modified_base 1: mod_base = OTHER; note = 2'-O-methoxyethyl 5-methylcytosine with phosphorothioate linkage
  modified_base 2: mod_base = OTHER; note = 2'-O-cyclopropyl modified nucleotide with phosphorothioate linkage
  modified_base 3: mod_base = OTHER; note = 2'-O-methoxyethyl modified nucleotide with phosphorothioate linkage
  modified_base 4: mod_base = OTHER; note = 2'-O-cyclopropyl modified nucleotide with phosphorothioate linkage
  modified_base 5: mod_base = OTHER; note = 2'-O-cyclopropyl modified nucleotide with phosphorothioate linkage
  modified_base 6: mod_base = OTHER; note = Nucleotide with phosphorothioate linkage
  modified_base 7: mod_base = OTHER; note = Thymine with phosphorothioate linkage
  modified_base 8: mod_base = OTHER; note = Nucleotide with phosphorothioate linkage
  modified_base 9: mod_base = OTHER; note = Nucleotide with phosphorothioate linkage
  modified_base 10: mod_base = OTHER; note = Nucleotide with phosphorothioate linkage
  modified_base 11: mod_base = OTHER; note = Nucleotide with phosphorothioate linkage
  modified_base 12: mod_base = OTHER; note = 5-methylcytosine with phosphorothioate linkage
  modified_base 13: mod_base = OTHER; note = Nucleotide with phosphorothioate linkage
  modified_base 14: mod_base = OTHER; note = Nucleotide with phosphorothioate linkage
  modified_base 15: mod_base = OTHER; note = Nucleotide with phosphorothioate linkage
  modified_base 16: mod_base = OTHER; note = 2'-O-methoxyethyl modified nucleotide with phosphorothioate linkage
  modified_base 17: mod_base = OTHER; note = 2'-O-methoxyethyl modified thymine with phosphorothioate linkage
  modified_base 18: mod_base = OTHER; note = 2'-O-methoxyethyl modified nucleotide with phosphorothioate linkage
  modified_base 19: mod_base = OTHER; note = 2'-O-methoxyethyl 5-methylcytosine with phosphorothioate linkage
  modified_base 20: mod_base = OTHER; note = 2'-O-methoxyethyl modified nucleotide
  misc_feature 1..5: note = RNA
  misc_feature 6..15: note = DNA
  misc_feature 16..20: note = RNA
cagaggtgaagcgaagtgca

SEQ ID NO: 515 - DNA, 20 bp, synthetic construct
  source 1..20: mol_type = other DNA
  modified_base 1: mod_base = OTHER; note = 2'-O-methoxyethyl 5-methylcytosine with phosphorothioate linkage
  modified_base 2: mod_base = OTHER; note = 2'-O-methoxyethyl modified nucleotide with phosphorothioate linkage
  modified_base 3: mod_base = OTHER; note = 2'-O-methoxyethyl modified nucleotide with phosphorothioate linkage
  modified_base 4: mod_base = OTHER; note = 2'-O-methoxyethyl modified nucleotide with phosphorothioate linkage
  modified_base 5: mod_base = OTHER; note = 2'-O-methoxyethyl modified nucleotide with phosphorothioate linkage
  modified_base 6: mod_base = OTHER; note = Nucleotide with phosphorothioate linkage
  modified_base 7: mod_base = OTHER; note = Thymine with phosphorothioate linkage
  modified_base 8: mod_base = OTHER; note = Nucleotide with phosphorothioate linkage
  modified_base 9: mod_base = OTHER; note = Nucleotide with phosphorothioate linkage
  modified_base 10: mod_base = OTHER; note = Nucleotide with phosphorothioate linkage
  modified_base 11: mod_base = OTHER; note = Nucleotide with phosphorothioate linkage
  modified_base 12: mod_base = OTHER; note = 5-methylcytosine with phosphorothioate linkage
  modified_base 13: mod_base = OTHER; note = Nucleotide with phosphorothioate linkage
  modified_base 14: mod_base = OTHER; note = Nucleotide with phosphorothioate linkage
  modified_base 15: mod_base = OTHER; note = Nucleotide with phosphorothioate linkage
  modified_base 16: mod_base = OTHER; note = 2'-O-cyclopropyl modified nucleotide with phosphorothioate linkage
  modified_base 17: mod_base = OTHER; note = 2'-O-methoxyethyl modified thymine with phosphorothioate linkage
  modified_base 18: mod_base = OTHER; note = 2'-O-cyclopropyl modified nucleotide with phosphorothioate linkage
  modified_base 19: mod_base = OTHER; note = 2'-O-methoxyethyl 5-methylcytosine with phosphorothioate linkage
  modified_base 20: mod_base = OTHER; note = 2'-O-cyclopropyl modified nucleotide
  misc_feature 1..5: note = RNA
  misc_feature 6..15: note = DNA
  misc_feature 16..20: note = RNA
cagaggtgaagcgaagtgca

SEQ ID NO: 516 - DNA, 20 bp, synthetic construct
  source 1..20: mol_type = other DNA
  modified_base 1: mod_base = OTHER; note = 2'-O-methoxyethyl 5-methylcytosine with phosphorothioate linkage
  modified_base 2: mod_base = OTHER; note = 2'-O-methoxyethyl modified nucleotide with phosphorothioate linkage
  modified_base 3: mod_base = OTHER; note = 2'-O-methoxyethyl modified nucleotide with phosphorothioate linkage
  modified_base 4: mod_base = OTHER; note = 2'-O-methoxyethyl modified nucleotide with phosphorothioate linkage
  modified_base 5: mod_base = OTHER; note = 2'-O-methoxyethyl modified nucleotide with phosphorothioate linkage
  modified_base 6: mod_base = OTHER; note = Nucleotide with phosphorothioate linkage
  modified_base 7: mod_base = OTHER; note = Thymine with phosphorothioate linkage
  modified_base 8: mod_base = OTHER; note = Nucleotide with phosphorothioate linkage
  modified_base 9: mod_base = OTHER; note = Nucleotide with phosphorothioate linkage
  modified_base 10: mod_base = OTHER; note = Nucleotide with phosphorothioate linkage
  modified_base 11: mod_base = OTHER; note = Nucleotide with phosphorothioate linkage
  modified_base 12: mod_base = OTHER; note = 5-methylcytosine with phosphorothioate linkage
  modified_base 13: mod_base = OTHER; note = Nucleotide with phosphorothioate linkage
  modified_base 14: mod_base = OTHER; note = Nucleotide with phosphorothioate linkage
  modified_base 15: mod_base = OTHER; note = Nucleotide with phosphorothioate linkage
  modified_base 16: mod_base = OTHER; note = 2'-O-cyclopropyl modified nucleotide with phosphorothioate linkage
  modified_base 17: mod_base = OTHER; note = 2'-O-cyclopropyl modified thymine with phosphorothioate linkage
  modified_base 18: mod_base = OTHER; note = 2'-O-methoxyethyl modified nucleotide with phosphorothioate linkage
  modified_base 19: mod_base = OTHER; note = 2'-O-methoxyethyl 5-methylcytosine with phosphorothioate linkage
  modified_base 20: mod_base = OTHER; note = 2'-O-cyclopropyl modified nucleotide
  misc_feature 1..5: note = RNA
  misc_feature 6..15: note = DNA
  misc_feature 16..20: note = RNA
cagaggtgaagcgaagtgca

SEQ ID NO: 517 - DNA, 20 bp, synthetic construct
  source 1..20: mol_type = other DNA
  modified_base 1: mod_base = OTHER; note = 2'-O-methoxyethyl 5-methylcytosine with phosphorothioate linkage
  modified_base 2: mod_base = OTHER; note = 2'-O-methoxyethyl modified nucleotide with phosphorothioate linkage
  modified_base 3: mod_base = OTHER; note = 2'-O-methoxyethyl modified nucleotide with phosphorothioate linkage
  modified_base 4: mod_base = OTHER; note = 2'-O-methoxyethyl modified nucleotide with phosphorothioate linkage
  modified_base 5: mod_base = OTHER; note = 2'-O-methoxyethyl modified nucleotide with phosphorothioate linkage
  modified_base 6: mod_base = OTHER; note = Nucleotide with phosphorothioate linkage
  modified_base 7: mod_base = OTHER; note = Thymine with phosphorothioate linkage
  modified_base 8: mod_base = OTHER; note = Nucleotide with phosphorothioate linkage
  modified_base 9: mod_base = OTHER; note = Nucleotide with phosphorothioate linkage
  modified_base 10: mod_base = OTHER; note = Nucleotide with phosphorothioate linkage
  modified_base 11: mod_base = OTHER; note = Nucleotide with phosphorothioate linkage
  modified_base 12: mod_base = OTHER; note = 5-methylcytosine with phosphorothioate linkage
  modified_base 13: mod_base = OTHER; note = Nucleotide with phosphorothioate linkage
  modified_base 14: mod_base = OTHER; note = Nucleotide with phosphorothioate linkage
  modified_base 15: mod_base = OTHER; note = Nucleotide with phosphorothioate linkage
  modified_base 16: mod_base = OTHER; note = 2'-O-cyclopropyl modified nucleotide with phosphorothioate linkage
  modified_base 17: mod_base = OTHER; note = 2'-O-methoxyethyl modified thymine with phosphorothioate linkage
  modified_base 18: mod_base = OTHER; note = 2'-O-methoxyethyl modified nucleotide with phosphorothioate linkage
  modified_base 19: mod_base = OTHER; note = 2'-O-cyclopropyl modified 5-methylcytosine with phosphorothioate linkage
  modified_base 20: mod_base = OTHER; note = 2'-O-cyclopropyl modified nucleotide
  misc_feature 1..5: note = RNA
  misc_feature 6..15: note = DNA
  misc_feature 16..20: note = RNA
cagaggtgaagcgaagtgca

SEQ ID NO: 518 - DNA, 20 bp, synthetic construct
  source 1..20: mol_type = other DNA
  modified_base 1: mod_base = OTHER; note = 2'-O-methoxyethyl 5-methylcytosine with phosphorothioate linkage
  modified_base 2: mod_base = OTHER; note = 2'-O-methoxyethyl modified nucleotide with phosphorothioate linkage
  modified_base 3: mod_base = OTHER; note = 2'-O-methoxyethyl modified nucleotide with phosphorothioate linkage
  modified_base 4: mod_base = OTHER; note = 2'-O-methoxyethyl modified nucleotide with phosphorothioate linkage
  modified_base 5: mod_base = OTHER; note = 2'-O-methoxyethyl modified nucleotide with phosphorothioate linkage
  modified_base 6: mod_base = OTHER; note = Nucleotide with phosphorothioate linkage
  modified_base 7: mod_base = OTHER; note = Thymine with phosphorothioate linkage
  modified_base 8: mod_base = OTHER; note = Nucleotide with phosphorothioate linkage
  modified_base 9: mod_base = OTHER; note = Nucleotide with phosphorothioate linkage
  modified_base 10: mod_base = OTHER; note = Nucleotide with phosphorothioate linkage
  modified_base 11: mod_base = OTHER; note = Nucleotide with phosphorothioate linkage
  modified_base 12: mod_base = OTHER; note = 5-methylcytosine with phosphorothioate linkage
  modified_base 13: mod_base = OTHER; note = Nucleotide with phosphorothioate linkage
  modified_base 14: mod_base = OTHER; note = Nucleotide with phosphorothioate linkage
  modified_base 15: mod_base = OTHER; note = Nucleotide with phosphorothioate linkage
  modified_base 16: mod_base = OTHER; note = 2'-O-cyclopropyl modified nucleotide with phosphorothioate linkage
  modified_base 17: mod_base = OTHER; note = 2'-O-methoxyethyl modified thymine with phosphorothioate linkage
  modified_base 18: mod_base = OTHER; note = 2'-O-cyclopropyl modified nucleotide with phosphorothioate linkage
  modified_base 19: mod_base = OTHER; note = 2'-O-cyclopropyl modified 5-methylcytosine with phosphorothioate linkage
  modified_base 20: mod_base = OTHER; note = 2'-O-methoxyethyl modified nucleotide
  misc_feature 1..5: note = RNA
  misc_feature 6..15: note = DNA
  misc_feature 16..20: note = RNA
cagaggtgaagcgaagtgca

SEQ ID NO: 519 - DNA, 20 bp, synthetic construct
  source 1..20: mol_type = other DNA
  modified_base 1: mod_base = OTHER; note = 2'-O-methoxyethyl 5-methylcytosine with phosphorothioate linkage
  modified_base 2: mod_base = OTHER; note = 2'-O-cyclopropyl modified nucleotide with phosphorothioate linkage
  modified_base 3: mod_base = OTHER; note = 2'-O-methoxyethyl modified nucleotide with phosphorothioate linkage
  modified_base 4: mod_base = OTHER; note = 2'-O-cyclopropyl modified nucleotide with phosphorothioate linkage
  modified_base 5: mod_base = OTHER; note = 2'-O-methoxyethyl modified nucleotide with phosphorothioate linkage
  modified_base 6: mod_base = OTHER; note = Nucleotide with phosphorothioate linkage
  modified_base 7: mod_base = OTHER; note = Thymine with phosphorothioate linkage
  modified_base 8: mod_base = OTHER; note = Nucleotide with phosphorothioate linkage
  modified_base 9: mod_base = OTHER; note = Nucleotide with phosphorothioate linkage
  modified_base 10: mod_base = OTHER; note = Nucleotide with phosphorothioate linkage
  modified_base 11: mod_base = OTHER; note = Nucleotide with phosphorothioate linkage
  modified_base 12: mod_base = OTHER; note = 5-methylcytosine with phosphorothioate linkage
  modified_base 13: mod_base = OTHER; note = Nucleotide with phosphorothioate linkage
  modified_base 14: mod_base = OTHER; note = Nucleotide with phosphorothioate linkage
  modified_base 15: mod_base = OTHER; note = Nucleotide with phosphorothioate linkage
  modified_base 16: mod_base = OTHER; note = 2'-O-methoxyethyl modified nucleotide with phosphorothioate linkage
  modified_base 17: mod_base = OTHER; note = 2'-O-methoxyethyl modified thymine with phosphorothioate linkage
  modified_base 18: mod_base = OTHER; note = 2'-O-methoxyethyl modified nucleotide with phosphorothioate linkage
  modified_base 19: mod_base = OTHER; note = 2'-O-methoxyethyl 5-methylcytosine with phosphorothioate linkage
  modified_base 20: mod_base = OTHER; note = 2'-O-cyclopropyl modified nucleotide
  misc_feature 1..5: note = RNA
  misc_feature 6..15: note = DNA
  misc_feature 16..20: note = RNA
cagaggtgaagcgaagtgca

SEQ ID NO: 520 - DNA, 20 bp, synthetic construct
  source 1..20: mol_type = other DNA
  modified_base 1: mod_base = OTHER; note = 2'-O-methoxyethyl 5-methylcytosine with phosphorothioate linkage
  modified_base 2: mod_base = OTHER; note = 2'-O-methoxyethyl modified nucleotide with phosphorothioate linkage
  modified_base 3: mod_base = OTHER; note = 2'-O-cyclopropyl modified nucleotide with phosphorothioate linkage
  modified_base 4: mod_base = OTHER; note = 2'-O-methoxyethyl modified nucleotide with phosphorothioate linkage
  modified_base 5: mod_base = OTHER; note = 2'-O-cyclopropyl modified nucleotide with phosphorothioate linkage
  modified_base 6: mod_base = OTHER; note = Nucleotide with phosphorothioate linkage
  modified_base 7: mod_base = OTHER; note = Thymine with phosphorothioate linkage
  modified_base 8: mod_base = OTHER; note = Nucleotide with phosphorothioate linkage
  modified_base 9: mod_base = OTHER; note = Nucleotide with phosphorothioate linkage
  modified_base 10: mod_base = OTHER; note = Nucleotide with phosphorothioate linkage
  modified_base 11: mod_base = OTHER; note = Nucleotide with phosphorothioate linkage
  modified_base 12: mod_base = OTHER; note = 5-methylcytosine with phosphorothioate linkage
  modified_base 13: mod_base = OTHER; note = Nucleotide with phosphorothioate linkage
  modified_base 14: mod_base = OTHER; note = Nucleotide with phosphorothioate linkage
  modified_base 15: mod_base = OTHER; note = Nucleotide with phosphorothioate linkage
  modified_base 16: mod_base = OTHER; note = 2'-O-cyclopropyl modified nucleotide with phosphorothioate linkage
  modified_base 17: mod_base = OTHER; note = 2'-O-methoxyethyl modified thymine with phosphorothioate linkage
  modified_base 18: mod_base = OTHER; note = 2'-O-methoxyethyl modified nucleotide with phosphorothioate linkage
  modified_base 19: mod_base = OTHER; note = 2'-O-methoxyethyl 5-methylcytosine with phosphorothioate linkage
  modified_base 20: mod_base = OTHER; note = 2'-O-methoxyethyl modified nucleotide
  misc_feature 1..5: note = RNA
  misc_feature 6..15: note = DNA
  misc_feature 16..20: note = RNA
cagaggtgaagcgaagtgca

SEQ ID NO: 521 - DNA, 20 bp, synthetic construct
  source 1..20: mol_type = other DNA
  modified_base 1: mod_base = OTHER; note = 2'-O-methoxyethyl 5-methylcytosine with phosphorothioate linkage
  modified_base 2: mod_base = OTHER; note = 2'-O-methoxyethyl modified nucleotide with phosphorothioate linkage
  modified_base 3: mod_base = OTHER; note = 2'-O-cyclopropyl modified nucleotide with phosphorothioate linkage
  modified_base 4: mod_base = OTHER; note = 2'-O-methoxyethyl modified nucleotide with phosphorothioate linkage
  modified_base 5: mod_base = OTHER; note = 2'-O-cyclopropyl modified nucleotide with phosphorothioate linkage
  modified_base 6: mod_base = OTHER; note = Nucleotide with phosphorothioate linkage
  modified_base 7: mod_base = OTHER; note = Thymine with phosphorothioate linkage
  modified_base 8: mod_base = OTHER; note = Nucleotide with phosphorothioate linkage
  modified_base 9: mod_base = OTHER; note = Nucleotide with phosphorothioate linkage
  modified_base 10: mod_base = OTHER; note = Nucleotide with phosphorothioate linkage
  modified_base 11: mod_base = OTHER; note = Nucleotide with phosphorothioate linkage
  modified_base 12: mod_base = OTHER; note = 5-methylcytosine with phosphorothioate linkage
  modified_base 13: mod_base = OTHER; note = Nucleotide with phosphorothioate linkage
  modified_base 14: mod_base = OTHER; note = Nucleotide with phosphorothioate linkage
  modified_base 15: mod_base = OTHER; note = Nucleotide with phosphorothioate linkage
  modified_base 16: mod_base = OTHER; note = 2'-O-methoxyethyl modified nucleotide with phosphorothioate linkage
  modified_base 17: mod_base = OTHER; note = 2'-O-methoxyethyl modified thymine with phosphorothioate linkage
  modified_base 18: mod_base = OTHER; note = 2'-O-cyclopropyl modified nucleotide with phosphorothioate linkage
  modified_base 19: mod_base = OTHER; note = 2'-O-methoxyethyl 5-methylcytosine with phosphorothioate linkage
  modified_base 20: mod_base = OTHER; note = 2'-O-methoxyethyl modified nucleotide
  misc_feature 1..5: note = RNA
  misc_feature 6..15: note = DNA
  misc_feature 16..20: note = RNA
cagaggtgaagcgaagtgca

SEQ ID NO: 522 - DNA, 20 bp, synthetic construct
  source 1..20: mol_type = other DNA
  modified_base 1: mod_base = OTHER; note = 2'-O-methoxyethyl 5-methylcytosine with phosphorothioate linkage
  modified_base 2: mod_base = OTHER; note = 2'-O-methoxyethyl modified nucleotide with phosphorothioate linkage
  modified_base 3: mod_base = OTHER; note = 2'-O-cyclopropyl modified nucleotide with phosphorothioate linkage
  modified_base 4: mod_base = OTHER; note = 2'-O-methoxyethyl modified nucleotide with phosphorothioate linkage
  modified_base 5: mod_base = OTHER; note = 2'-O-methoxyethyl modified nucleotide with phosphorothioate linkage
  modified_base 6: mod_base = OTHER; note = Nucleotide with phosphorothioate linkage
  modified_base 7: mod_base = OTHER; note = Thymine with phosphorothioate linkage
  modified_base 8: mod_base = OTHER; note = Nucleotide with phosphorothioate linkage
  modified_base 9: mod_base = OTHER; note = Nucleotide with phosphorothioate linkage
  modified_base 10: mod_base = OTHER; note = Nucleotide with phosphorothioate linkage
  modified_base 11: mod_base = OTHER; note = Nucleotide with phosphorothioate linkage
  modified_base 12: mod_base = OTHER; note = 5-methylcytosine with phosphorothioate linkage
  modified_base 13: mod_base = OTHER; note = Nucleotide with phosphorothioate linkage
  modified_base 14: mod_base = OTHER; note = Nucleotide with phosphorothioate linkage
  modified_base 15: mod_base = OTHER; note = Nucleotide with phosphorothioate linkage
  modified_base 16: mod_base = OTHER; note = 2'-O-cyclopropyl modified nucleotide with phosphorothioate linkage
  modified_base 17: mod_base = OTHER; note = 2'-O-methoxyethyl modified thymine with phosphorothioate linkage
  modified_base 18: mod_base = OTHER; note = 2'-O-cyclopropyl modified nucleotide with phosphorothioate linkage
  modified_base 19: mod_base = OTHER; note = 2'-O-methoxyethyl 5-methylcytosine with phosphorothioate linkage
  modified_base 20: mod_base = OTHER; note = 2'-O-methoxyethyl modified nucleotide
  misc_feature 1..5: note = RNA
  misc_feature 6..15: note = DNA
  misc_feature 16..20: note = RNA
cagaggtgaagcgaagtgca

SEQ ID NO: 523 - DNA, 20 bp, synthetic construct
  source 1..20: mol_type = other DNA
  modified_base 1: mod_base = OTHER; note = 2'-O-methoxyethyl 5-methylcytosine with phosphorothioate linkage
  modified_base 2: mod_base = OTHER; note = 2'-O-methoxyethyl modified nucleotide with phosphorothioate linkage
  modified_base 3: mod_base = OTHER; note = 2'-O-methoxyethyl modified nucleotide with phosphorothioate linkage
  modified_base 4: mod_base = OTHER; note = 2'-O-methoxyethyl modified nucleotide with phosphorothioate linkage
  modified_base 5: mod_base = OTHER; note = 2'-O-cyclopropyl modified nucleotide with phosphorothioate linkage
  modified_base 6: mod_base = OTHER; note = Nucleotide with phosphorothioate linkage
  modified_base 7: mod_base = OTHER; note = Thymine with phosphorothioate linkage
  modified_base 8: mod_base = OTHER; note = Nucleotide with phosphorothioate linkage
  modified_base 9: mod_base = OTHER; note = Nucleotide with phosphorothioate linkage
  modified_base 10: mod_base = OTHER; note = Nucleotide with phosphorothioate linkage
  modified_base 11: mod_base = OTHER; note = Nucleotide with phosphorothioate linkage
  modified_base 12: mod_base = OTHER; note = 5-methylcytosine with phosphorothioate linkage
  modified_base 13: mod_base = OTHER; note = Nucleotide with phosphorothioate linkage
  modified_base 14: mod_base = OTHER; note = Nucleotide with phosphorothioate linkage
  modified_base 15: mod_base = OTHER; note = Nucleotide with phosphorothioate linkage
  modified_base 16: mod_base = OTHER; note = 2'-O-cyclopropyl modified nucleotide with phosphorothioate linkage
  modified_base 17: mod_base = OTHER; note = 2'-O-methoxyethyl modified thymine with phosphorothioate linkage
  modified_base 18: mod_base = OTHER; note = 2'-O-cyclopropyl modified nucleotide with phosphorothioate linkage
  modified_base 19: mod_base = OTHER; note = 2'-O-methoxyethyl 5-methylcytosine with phosphorothioate linkage
  modified_base 20: mod_base = OTHER; note = 2'-O-methoxyethyl modified nucleotide
  misc_feature 1..5: note = RNA
  misc_feature 6..15: note = DNA
  misc_feature 16..20: note = RNA
cagaggtgaagcgaagtgca

SEQ ID NO: 524 - DNA, 20 bp, synthetic construct
  source 1..20: mol_type = other DNA
  modified_base 1: mod_base = OTHER; note = 2'-O-methoxyethyl 5-methylcytosine with phosphorothioate linkage
  modified_base 2: mod_base = OTHER; note = 2'-O-methoxyethyl modified nucleotide with phosphorothioate linkage
  modified_base 3: mod_base = OTHER; note = 2'-O-methoxyethyl modified nucleotide with phosphorothioate linkage
  modified_base 4: mod_base = OTHER; note = 2'-O-methoxyethyl modified nucleotide with phosphorothioate linkage
  modified_base 5: mod_base = OTHER; note = 2'-O-methoxyethyl modified nucleotide with phosphorothioate linkage
  modified_base 6: mod_base = OTHER; note = Nucleotide with phosphorothioate linkage
  modified_base 7: mod_base = OTHER; note = Thymine with phosphorothioate linkage
  modified_base 8: mod_base = OTHER; note = Nucleotide with phosphorothioate linkage
  modified_base 9: mod_base = OTHER; note = Nucleotide with phosphorothioate linkage
  modified_base 10: mod_base = OTHER; note = Nucleotide with phosphorothioate linkage
  modified_base 11: mod_base = OTHER; note = Nucleotide with phosphorothioate linkage
  modified_base 12: mod_base = OTHER; note = 5-methylcytosine with phosphorothioate linkage
  modified_base 13: mod_base = OTHER; note = Nucleotide with phosphorothioate linkage
  modified_base 14: mod_base = OTHER; note = Nucleotide with phosphorothioate linkage
  modified_base 15: mod_base = OTHER; note = Nucleotide with phosphorothioate linkage
  modified_base 16: mod_base = OTHER; note = 2'-O-cyclopropyl modified nucleotide with phosphorothioate linkage
  modified_base 17: mod_base = OTHER; note = 2'-O-methoxyethyl modified thymine with phosphorothioate linkage
  modified_base 18: mod_base = OTHER; note = Locked nucleic acid with phosphorothioate linkage
  modified_base 19: mod_base = OTHER; note = 2'-O-methoxyethyl 5-methylcytosine with phosphorothioate linkage
  modified_base 20: mod_base = OTHER; note = Locked nucleic acid
  misc_feature 1..5: note = RNA
  misc_feature 6..15: note = DNA
  misc_feature 16..20: note = RNA
cagaggtgaagcgaagtgca

SEQ ID NO: 525 - DNA, 20 bp, synthetic construct
  source 1..20: mol_type = other DNA
  modified_base 1: mod_base = OTHER; note = 2'-O-methoxyethyl 5-methylcytosine with phosphorothioate linkage
  modified_base 2: mod_base = OTHER; note = 2'-O-methoxyethyl modified nucleotide with phosphorothioate linkage
  modified_base 3: mod_base = OTHER; note = 2'-O-methoxyethyl modified nucleotide with phosphorothioate linkage
  modified_base 4: mod_base = OTHER; note = 2'-O-methoxyethyl modified nucleotide with phosphorothioate linkage
  modified_base 5: mod_base = OTHER; note = 2'-O-methoxyethyl modified nucleotide with phosphorothioate linkage
  modified_base 6: mod_base = OTHER; note = Nucleotide with phosphorothioate linkage
  modified_base 7: mod_base = OTHER; note = Thymine with phosphorothioate linkage
  modified_base 8: mod_base = OTHER; note = Nucleotide with phosphorothioate linkage
  modified_base 9: mod_base = OTHER; note = Nucleotide with phosphorothioate linkage
  modified_base 10: mod_base = OTHER; note = Nucleotide with phosphorothioate linkage
  modified_base 11: mod_base = OTHER; note = Nucleotide with phosphorothioate linkage
  modified_base 12: mod_base = OTHER; note = 5-methylcytosine with phosphorothioate linkage
  modified_base 13: mod_base = OTHER; note = Nucleotide with phosphorothioate linkage
  modified_base 14: mod_base = OTHER; note = Nucleotide with phosphorothioate linkage
  modified_base 15: mod_base = OTHER; note = Nucleotide with phosphorothioate linkage
  modified_base 16: mod_base = OTHER; note = Locked nucleic acid with phosphorothioate linkage
  modified_base 17: mod_base = OTHER; note = 2'-O-methoxyethyl modified thymine with phosphorothioate linkage
  modified_base 18: mod_base = OTHER; note = 2'-O-cyclopropyl modified nucleotide with phosphorothioate linkage
  modified_base 19: mod_base = OTHER; note = 2'-O-methoxyethyl 5-methylcytosine with phosphorothioate linkage
  modified_base 20: mod_base = OTHER; note = Locked nucleic acid
  misc_feature 1..5: note = RNA
  misc_feature 6..15: note = DNA
  misc_feature 16..20: note = RNA
cagaggtgaagcgaagtgca

SEQ ID NO: 526 - DNA, 20 bp, synthetic construct
  source 1..20: mol_type = other DNA
  modified_base 1: mod_base = OTHER; note = 2'-O-methoxyethyl 5-methylcytosine with phosphorothioate linkage
  modified_base 2: mod_base = OTHER; note = 2'-O-methoxyethyl modified nucleotide with phosphorothioate linkage
  modified_base 3: mod_base = OTHER; note = 2'-O-methoxyethyl modified nucleotide with phosphorothioate linkage
  modified_base 4: mod_base = OTHER; note = 2'-O-methoxyethyl modified nucleotide with phosphorothioate linkage
  modified_base 5: mod_base = OTHER; note = 2'-O-methoxyethyl modified nucleotide with phosphorothioate linkage
  modified_base 6: mod_base = OTHER; note = Nucleotide with phosphorothioate linkage
  modified_base 7: mod_base = OTHER; note = Thymine with phosphorothioate linkage
  modified_base 8: mod_base = OTHER; note = Nucleotide with phosphorothioate linkage
  modified_base 9: mod_base = OTHER; note = Nucleotide with phosphorothioate linkage
  modified_base 10: mod_base = OTHER; note = Nucleotide with phosphorothioate linkage
  modified_base 11: mod_base = OTHER; note = Nucleotide with phosphorothioate linkage
  modified_base 12: mod_base = OTHER; note = 5-methylcytosine with phosphorothioate linkage
  modified_base 13: mod_base = OTHER; note = Nucleotide with phosphorothioate linkage
  modified_base 14: mod_base = OTHER; note = Nucleotide with phosphorothioate linkage
  modified_base 15: mod_base = OTHER; note = Nucleotide with phosphorothioate linkage
  modified_base 16: mod_base = OTHER; note = Locked nucleic acid with phosphorothioate linkage
  modified_base 17: mod_base = OTHER; note = 2'-O-methoxyethyl modified thymine with phosphorothioate linkage
  modified_base 18: mod_base = OTHER; note = Locked nucleic acid with phosphorothioate linkage
  modified_base 19: mod_base = OTHER; note = 2'-O-methoxyethyl 5-methylcytosine with phosphorothioate linkage
  modified_base 20: mod_base = OTHER; note = 2'-O-cyclopropyl modified nucleotide
  misc_feature 1..5: note = RNA
  misc_feature 6..15: note = DNA
  misc_feature 16..20: note = RNA
cagaggtgaagcgaagtgca

SEQ ID NO: 527 - DNA, 20 bp, synthetic construct
  source 1..20: mol_type = other DNA
  modified_base 1: mod_base = OTHER; note = 2'-O-methoxyethyl 5-methylcytosine with phosphorothioate linkage
  modified_base 2: mod_base = OTHER; note = 2'-O-methoxyethyl modified nucleotide with phosphorothioate linkage
  modified_base 3: mod_base = OTHER; note = 2'-O-methoxyethyl modified nucleotide with phosphorothioate linkage
  modified_base 4: mod_base = OTHER; note = 2'-O-methoxyethyl modified nucleotide with phosphorothioate linkage
  modified_base 5: mod_base = OTHER; note = 2'-O-methoxyethyl modified nucleotide with phosphorothioate linkage
  modified_base 6: mod_base = OTHER; note = Nucleotide with phosphorothioate linkage
  modified_base 7: mod_base = OTHER; note = Thymine with phosphorothioate linkage
  modified_base 8: mod_base = OTHER; note = Nucleotide with phosphorothioate linkage
  modified_base 9: mod_base = OTHER; note = Nucleotide with phosphorothioate linkage
  modified_base 10: mod_base = OTHER; note = Nucleotide with phosphorothioate linkage
  modified_base 11: mod_base = OTHER; note = Nucleotide with phosphorothioate linkage
  modified_base 12: mod_base = OTHER; note = 5-methylcytosine with phosphorothioate linkage
  modified_base 13: mod_base = OTHER; note = Nucleotide with phosphorothioate linkage
  modified_base 14: mod_base = OTHER; note = Nucleotide with phosphorothioate linkage
  modified_base 15: mod_base = OTHER; note = Nucleotide with phosphorothioate linkage
  modified_base 16: mod_base = OTHER; note = 2'-O-cyclopropyl modified nucleotide with phosphorothioate linkage
  modified_base 17: mod_base = OTHER; note = 2'-O-methoxyethyl modified thymine with phosphorothioate linkage
  modified_base 18: mod_base = OTHER; note = 2'-O-cyclopropyl modified nucleotide with phosphorothioate linkage
  modified_base 19: mod_base = OTHER; note = 2'-O-methoxyethyl 5-methylcytosine with phosphorothioate linkage
  modified_base 20: mod_base = OTHER; note = Locked nucleic acid
  misc_feature 1..5: note = RNA
  misc_feature 6..15: note = DNA
  misc_feature 16..20: note = RNA
cagaggtgaagcgaagtgca

SEQ ID NO: 528 - DNA, 20 bp, synthetic construct
  source 1..20: mol_type = other DNA
  modified_base 1: mod_base = OTHER; note = 2'-O-methoxyethyl 5-methylcytosine with phosphorothioate linkage
  modified_base 2: mod_base = OTHER; note = 2'-O-methoxyethyl modified nucleotide with phosphorothioate linkage
  modified_base 3: mod_base = OTHER; note = 2'-O-methoxyethyl modified nucleotide with phosphorothioate linkage
  modified_base 4: mod_base = OTHER; note = 2'-O-methoxyethyl modified nucleotide with phosphorothioate linkage
  modified_base 5: mod_base = OTHER; note = 2'-O-methoxyethyl modified nucleotide with phosphorothioate linkage
  modified_base 6: mod_base = OTHER; note = Nucleotide with phosphorothioate linkage
  modified_base 7: mod_base = OTHER; note = Thymine with phosphorothioate linkage
  modified_base 8: mod_base = OTHER; note = Nucleotide with phosphorothioate linkage
  modified_base 9: mod_base = OTHER; note = Nucleotide with phosphorothioate linkage
  modified_base 10: mod_base = OTHER; note = Nucleotide with phosphorothioate linkage
  modified_base 11: mod_base = OTHER; note = Nucleotide with phosphorothioate linkage
  modified_base 12: mod_base = OTHER; note = 5-methylcytosine with phosphorothioate linkage
  modified_base 13: mod_base = OTHER; note = Nucleotide with phosphorothioate linkage
  modified_base 14: mod_base = OTHER; note = Nucleotide with phosphorothioate linkage
  modified_base 15: mod_base = OTHER; note = Nucleotide with phosphorothioate linkage
  modified_base 16: mod_base = OTHER; note = Locked nucleic acid with phosphorothioate linkage
  modified_base 17: mod_base = OTHER; note = 2'-O-methoxyethyl modified thymine with phosphorothioate linkage
  modified_base 18: mod_base = OTHER; note = 2'-O-cyclopropyl modified nucleotide with phosphorothioate linkage
  modified_base 19: mod_base = OTHER; note = 2'-O-methoxyethyl 5-methylcytosine with phosphorothioate linkage
  modified_base 20: mod_base = OTHER; note = 2'-O-cyclopropyl modified nucleotide
  misc_feature 1..5: note = RNA
  misc_feature 6..15: note = DNA
  misc_feature 16..20: note = RNA
cagaggtgaagcgaagtgca

SEQ ID NO: 529 - DNA, 20 bp, synthetic construct
  source 1..20: mol_type = other DNA
  modified_base 1: mod_base = OTHER; note = 2'-O-methoxyethyl 5-methylcytosine with phosphorothioate linkage
  modified_base 2: mod_base = OTHER; note = 2'-O-methoxyethyl modified nucleotide with phosphorothioate linkage
  modified_base 3: mod_base = OTHER; note = 2'-O-methoxyethyl modified nucleotide with phosphorothioate linkage
  modified_base 4: mod_base = OTHER; note = 2'-O-methoxyethyl modified nucleotide with phosphorothioate linkage
  modified_base 5: mod_base = OTHER; note = 2'-O-methoxyethyl modified nucleotide with phosphorothioate linkage
  modified_base 6: mod_base = OTHER; note = Nucleotide with phosphorothioate linkage
  modified_base 7: mod_base = OTHER; note = Thymine with phosphorothioate linkage
  modified_base 8: mod_base = OTHER; note = Nucleotide with phosphorothioate linkage
  modified_base 9: mod_base = OTHER; note = Nucleotide with phosphorothioate linkage
  modified_base 10: mod_base = OTHER; note = Nucleotide with phosphorothioate linkage
  modified_base 11: mod_base = OTHER; note = Nucleotide with phosphorothioate linkage
  modified_base 12: mod_base = OTHER; note = 5-methylcytosine with phosphorothioate linkage
  modified_base 13: mod_base = OTHER; note = Nucleotide with phosphorothioate linkage
  modified_base 14: mod_base = OTHER; note = Nucleotide with phosphorothioate linkage
  modified_base 15: mod_base = OTHER; note = Nucleotide with phosphorothioate linkage
  modified_base 16: mod_base = OTHER; note = 2'-O-cyclopropyl modified nucleotide with phosphorothioate linkage
  modified_base 17: mod_base = OTHER; note = 2'-O-methoxyethyl modified thymine with phosphorothioate linkage
  modified_base 18: mod_base = OTHER; note = Locked nucleic acid with phosphorothioate linkage
  modified_base 19: mod_base = OTHER; note = 2'-O-methoxyethyl 5-methylcytosine with phosphorothioate linkage
  modified_base 20: mod_base = OTHER; note = 2'-O-cyclopropyl modified nucleotide
  misc_feature 1..5: note = RNA
  misc_feature 6..15: note = DNA
  misc_feature 16..20: note = RNA
cagaggtgaagcgaagtgca

SEQ ID NO: 530 - DNA, 20 bp, synthetic construct
  source 1..20: mol_type = other DNA
  modified_base 1: mod_base = OTHER; note = 2'-O-methoxyethyl modified nucleotide with phosphorothioate linkage
  modified_base 2: mod_base = OTHER; note = 2'-O-methoxyethyl modified nucleotide with phosphorothioate linkage
  modified_base 3: mod_base = OTHER; note = 2'-O-methoxyethyl modified nucleotide with phosphorothioate linkage
  modified_base 4: mod_base = OTHER; note = Locked thymine with phosphorothioate linkage
  modified_base 5: mod_base = OTHER; note = 2'-O-methoxyethyl modified nucleotide with phosphorothioate linkage
  modified_base 6: mod_base = OTHER; note = Nucleotide with phosphorothioate linkage
  modified_base 7: mod_base = OTHER; note = Nucleotide with phosphorothioate linkage
  modified_base 8: mod_base = OTHER; note = Nucleotide with phosphorothioate linkage
  modified_base 9: mod_base = OTHER; note = 5-methylcytosine with phosphorothioate linkage
  modified_base 10: mod_base = OTHER; note = Nucleotide with phosphorothioate linkage
  modified_base 11: mod_base = OTHER; note = Nucleotide with phosphorothioate linkage
  modified_base 12: mod_base = OTHER; note = Nucleotide with phosphorothioate linkage
  modified_base 13: mod_base = OTHER; note = Nucleotide with phosphorothioate linkage
  modified_base 14: mod_base = OTHER; note = Thymine with phosphorothioate linkage
  modified_base 15: mod_base = OTHER; note = Nucleotide with phosphorothioate linkage
  modified_base 16: mod_base = OTHER; note = Locked 5-methylcytosine with phosphorothioate linkage
  modified_base 17: mod_base = OTHER; note = 2'-O-methoxyethyl modified nucleotide with phosphorothioate linkage
  modified_base 18: mod_base = OTHER; note = 2'-O-methoxyethyl 5-methylcytosine with phosphorothioate linkage
  modified_base 19: mod_base = OTHER; note = 2'-O-methoxyethyl modified nucleotide with phosphorothioate linkage
  modified_base 20: mod_base = OTHER; note = 2'-O-methoxyethyl 5-methylcytosine
  misc_feature 1..5: note = RNA
  misc_feature 6..15: note = DNA
  misc_feature 16..20: note = RNA
aggtgaagcgaagtgcacac

SEQ ID NO: 531 - DNA, 20 bp, synthetic construct
  source 1..20: mol_type = other DNA
  modified_base 1: mod_base = OTHER; note = 2'-O-methoxyethyl modified nucleotide with phosphorothioate linkage
  modified_base 2: mod_base = OTHER; note = 2'-O-methoxyethyl modified nucleotide with phosphorothioate linkage
  modified_base 3: mod_base = OTHER; note = 2'-O-methoxyethyl modified nucleotide with phosphorothioate linkage
  modified_base 4: mod_base = OTHER; note = Locked thymine with phosphorothioate linkage
  modified_base 5: mod_base = OTHER; note = 2'-O-methoxyethyl modified nucleotide with phosphorothioate linkage
  modified_base 6: mod_base = OTHER; note = Nucleotide with phosphorothioate linkage
  modified_base 7: mod_base = OTHER; note = Nucleotide with phosphorothioate linkage
  modified_base 8: mod_base = OTHER; note = Nucleotide with phosphorothioate linkage
  modified_base 9: mod_base = OTHER; note = 5-methylcytosine with phosphorothioate linkage
  modified_base 10: mod_base = OTHER; note = Nucleotide with phosphorothioate linkage
  modified_base 11: mod_base = OTHER; note = Nucleotide with phosphorothioate linkage
  modified_base 12: mod_base = OTHER; note = Nucleotide with phosphorothioate linkage
  modified_base 13: mod_base = OTHER; note = Nucleotide with phosphorothioate linkage
  modified_base 14: mod_base = OTHER; note = Thymine with phosphorothioate linkage
  modified_base 15: mod_base = OTHER; note = Nucleotide with phosphorothioate linkage
  modified_base 16: mod_base = OTHER; note = 2'-O-methoxyethyl 5-methylcytosine with phosphorothioate linkage
  modified_base 17: mod_base = OTHER; note = 2'-O-methoxyethyl modified nucleotide with phosphorothioate linkage
  modified_base 18: mod_base = OTHER; note = Locked 5-methylcytosine with phosphorothioate linkage
  modified_base 19: mod_base = OTHER; note = 2'-O-methoxyethyl modified nucleotide with phosphorothioate linkage
  modified_base 20: mod_base = OTHER; note = 2'-O-methoxyethyl 5-methylcytosine
  misc_feature 1..5: note = RNA
  misc_feature 6..15: note = DNA
  misc_feature 16..20: note = RNA
aggtgaagcgaagtgcacac

SEQ ID NO: 532 - DNA, 20 bp, synthetic construct
  source 1..20: mol_type = other DNA
  modified_base 1: mod_base = OTHER; note = 2'-O-methoxyethyl modified nucleotide with phosphorothioate linkage
  modified_base 2: mod_base = OTHER; note = 2'-O-methoxyethyl modified nucleotide with phosphorothioate linkage
  modified_base 3: mod_base = OTHER; note = 2'-O-methoxyethyl modified nucleotide with phosphorothioate linkage
  modified_base 4: mod_base = OTHER; note = Locked thymine with phosphorothioate linkage
  modified_base 5: mod_base = OTHER; note = 2'-O-methoxyethyl modified nucleotide with phosphorothioate linkage
  modified_base 6: mod_base = OTHER; note = Nucleotide with phosphorothioate linkage
  modified_base 7: mod_base = OTHER; note = Nucleotide with phosphorothioate linkage
  modified_base 8: mod_base = OTHER; note = Nucleotide with phosphorothioate linkage
  modified_base 9: mod_base = OTHER; note = 5-methylcytosine with phosphorothioate linkage
  modified_base 10: mod_base = OTHER; note = Nucleotide with phosphorothioate linkage
  modified_base 11: mod_base = OTHER; note = Nucleotide with phosphorothioate linkage
  modified_base 12: mod_base = OTHER; note = Nucleotide with phosphorothioate linkage
  modified_base 13: mod_base = OTHER; note = Nucleotide with phosphorothioate linkage
  modified_base 14: mod_base = OTHER; note = Thymine with phosphorothioate linkage
  modified_base 15: mod_base = OTHER; note = Nucleotide with phosphorothioate linkage
  modified_base 16: mod_base = OTHER; note = 2'-O-methoxyethyl 5-methylcytosine with phosphorothioate linkage
  modified_base 17: mod_base = OTHER; note = 2'-O-methoxyethyl modified nucleotide with phosphorothioate linkage
  modified_base 18: mod_base = OTHER; note = 2'-O-methoxyethyl 5-methylcytosine with phosphorothioate linkage
  modified_base 19: mod_base = OTHER; note = 2'-O-methoxyethyl modified nucleotide with phosphorothioate linkage
  modified_base 20: mod_base = OTHER; note = Locked 5-methylcytosine
  misc_feature 1..5: note = RNA
  misc_feature 6..15: note = DNA
  misc_feature 16..20: note = RNA
aggtgaagcgaagtgcacac

SEQ ID NO: 533 - DNA, 20 bp, synthetic construct
  source 1..20: mol_type = other DNA
  modified_base 1: mod_base = OTHER; note = 2'-O-methoxyethyl modified nucleotide with phosphorothioate linkage
  modified_base 2: mod_base = OTHER; note = 2'-O-methoxyethyl modified nucleotide with phosphorothioate linkage
  modified_base 3: mod_base = OTHER; note = 2'-O-methoxyethyl modified nucleotide with phosphorothioate linkage
  modified_base 4: mod_base = OTHER; note = 2'-O-methoxyethyl modified thymine with phosphorothioate linkage
  modified_base 5: mod_base = OTHER; note = 2'-O-methoxyethyl modified nucleotide with phosphorothioate linkage
  modified_base 6: mod_base = OTHER; note = Nucleotide with phosphorothioate linkage
  modified_base 7: mod_base = OTHER; note = Nucleotide with phosphorothioate linkage
  modified_base 8: mod_base = OTHER; note = Nucleotide with phosphorothioate linkage
  modified_base 9: mod_base = OTHER; note = 5-methylcytosine with phosphorothioate linkage
  modified_base 10: mod_base = OTHER; note = Nucleotide with phosphorothioate linkage
  modified_base 11: mod_base = OTHER; note = Nucleotide with phosphorothioate linkage
  modified_base 12: mod_base = OTHER; note = Nucleotide with phosphorothioate linkage
  modified_base 13: mod_base = OTHER; note = Nucleotide with phosphorothioate linkage
  modified_base 14: mod_base = OTHER; note = Thymine with phosphorothioate linkage
  modified_base 15: mod_base = OTHER; note = Nucleotide with phosphorothioate linkage
  modified_base 16: mod_base = OTHER; note = Locked 5-methylcytosine with phosphorothioate linkage
  modified_base 17: mod_base = OTHER; note = 2'-O-methoxyethyl modified nucleotide with phosphorothioate linkage
  modified_base 18: mod_base = OTHER; note = Locked 5-methylcytosine with phosphorothioate linkage
  modified_base 19: mod_base = OTHER; note = 2'-O-methoxyethyl modified nucleotide with phosphorothioate linkage
  modified_base 20: mod_base = OTHER; note = 2'-O-methoxyethyl 5-methylcytosine
  misc_feature 1..5: note = RNA
  misc_feature 6..15: note = DNA
  misc_feature 16..20: note = RNA
aggtgaagcgaagtgcacac

SEQ ID NO: 534 - DNA, 20 bp, synthetic construct
  source 1..20: mol_type = other DNA
  modified_base 1: mod_base = OTHER; note = 2'-O-methoxyethyl modified nucleotide with phosphorothioate linkage
  modified_base 2: mod_base = OTHER; note = 2'-O-methoxyethyl modified nucleotide with phosphorothioate linkage
  modified_base 3: mod_base = OTHER; note = 2'-O-methoxyethyl modified nucleotide with phosphorothioate linkage
  modified_base 4: mod_base = OTHER; note = 2'-O-methoxyethyl modified thymine with phosphorothioate linkage
  modified_base 5: mod_base = OTHER; note = 2'-O-methoxyethyl modified nucleotide with phosphorothioate linkage
  modified_base 6: mod_base = OTHER; note = Nucleotide with phosphorothioate linkage
  modified_base 7: mod_base = OTHER; note = Nucleotide with phosphorothioate linkage
  modified_base 8: mod_base = OTHER; note = Nucleotide with phosphorothioate linkage
  modified_base 9: mod_base = OTHER; note = 5-methylcytosine with phosphorothioate linkage
  modified_base 10: mod_base = OTHER; note = Nucleotide with phosphorothioate linkage
  modified_base 11: mod_base = OTHER; note = Nucleotide with phosphorothioate linkage
  modified_base 12: mod_base = OTHER; note = Nucleotide with phosphorothioate linkage
  modified_base 13: mod_base = OTHER; note = Nucleotide with phosphorothioate linkage
  modified_base 14: mod_base = OTHER; note = Thymine with phosphorothioate linkage
  modified_base 15: mod_base = OTHER; note = Nucleotide with phosphorothioate linkage
  modified_base 16: mod_base = OTHER; note = Locked 5-methylcytosine with phosphorothioate linkage
  modified_base 17: mod_base = OTHER; note = 2'-O-methoxyethyl modified nucleotide with phosphorothioate linkage
  modified_base 18: mod_base = OTHER; note = 2'-O-methoxyethyl 5-methylcytosine with phosphorothioate linkage
  modified_base 19: mod_base = OTHER; note = 2'-O-methoxyethyl modified nucleotide with phosphorothioate linkage
  modified_base 20: mod_base = OTHER; note = Locked 5-methylcytosine
  misc_feature 1..5: note = RNA
  misc_feature 6..15: note = DNA
  misc_feature 16..20: note = RNA
aggtgaagcgaagtgcacac

SEQ ID NO: 535 - DNA, 20 bp, synthetic construct
  source 1..20: mol_type = other DNA
  modified_base 1: mod_base = OTHER; note = 2'-O-methoxyethyl modified nucleotide with phosphorothioate linkage
  modified_base 2: mod_base = OTHER; note = 2'-O-methoxyethyl modified nucleotide with phosphorothioate linkage
  modified_base 3: mod_base = OTHER; note = 2'-O-methoxyethyl modified nucleotide with phosphorothioate linkage
  modified_base 4: mod_base = OTHER; note = 2'-O-methoxyethyl modified thymine with phosphorothioate linkage
  modified_base 5: mod_base = OTHER; note = 2'-O-methoxyethyl modified nucleotide with phosphorothioate linkage
  modified_base 6: mod_base = OTHER; note = Nucleotide with phosphorothioate linkage
  modified_base 7: mod_base = OTHER; note = Nucleotide with phosphorothioate linkage
  modified_base 8: mod_base = OTHER; note = Nucleotide with phosphorothioate linkage
  modified_base 9: mod_base = OTHER; note = 5-methylcytosine with phosphorothioate linkage
  modified_base 10: mod_base = OTHER; note = Nucleotide with phosphorothioate linkage
  modified_base 11: mod_base = OTHER; note = Nucleotide with phosphorothioate linkage
  modified_base 12: mod_base = OTHER; note = Nucleotide with phosphorothioate linkage
  modified_base 13: mod_base = OTHER; note = Nucleotide with phosphorothioate linkage
  modified_base 14: mod_base = OTHER; note = Thymine with phosphorothioate linkage
  modified_base 15: mod_base = OTHER; note = Nucleotide with phosphorothioate linkage
  modified_base 16: mod_base = OTHER; note = 2'-O-methoxyethyl 5-methylcytosine with phosphorothioate linkage
  modified_base 17: mod_base = OTHER; note = 2'-O-methoxyethyl modified nucleotide with phosphorothioate linkage
  modified_base 18: mod_base = OTHER; note = Locked 5-methylcytosine with phosphorothioate linkage
  modified_base 19: mod_base = OTHER; note = 2'-O-methoxyethyl modified nucleotide with phosphorothioate linkage
  modified_base 20: mod_base = OTHER; note = Locked 5-methylcytosine
  misc_feature 1..5: note = RNA
  misc_feature 6..15: note = DNA
  misc_feature 16..20: note = RNA
aggtgaagcgaagtgcacac

SEQ ID NO: 536 - DNA, 20 bp, synthetic construct
  source 1..20: mol_type = other DNA
  modified_base 1: mod_base = OTHER; note = Locked nucleic acid with phosphorothioate linkage
  modified_base 2: mod_base = OTHER; note = 2'-O-methoxyethyl modified nucleotide with phosphorothioate linkage
  modified_base 3: mod_base = OTHER; note = 2'-O-methoxyethyl modified nucleotide with phosphorothioate linkage
  modified_base 4: mod_base = OTHER; note = 2'-O-methoxyethyl modified thymine with phosphorothioate linkage
  modified_base 5: mod_base = OTHER; note = 2'-O-methoxyethyl modified nucleotide with phosphorothioate linkage
  modified_base 6: mod_base = OTHER; note = Nucleotide with phosphorothioate linkage
  modified_base 7: mod_base = OTHER; note = Nucleotide with phosphorothioate linkage
  modified_base 8: mod_base = OTHER; note = Nucleotide with phosphorothioate linkage
  modified_base 9: mod_base = OTHER; note = 5-methylcytosine with phosphorothioate linkage
  modified_base 10: mod_base = OTHER; note = Nucleotide with phosphorothioate linkage
  modified_base 11: mod_base = OTHER; note = Nucleotide with phosphorothioate linkage
  modified_base 12: mod_base = OTHER; note = Nucleotide with phosphorothioate linkage
  modified_base 13: mod_base = OTHER; note = Nucleotide with phosphorothioate linkage
  modified_base 14: mod_base = OTHER; note = Thymine with phosphorothioate linkage
  modified_base 15: mod_base = OTHER; note = Nucleotide with phosphorothioate linkage
  modified_base 16: mod_base = OTHER; note = 2'-O-methoxyethyl 5-methylcytosine with phosphorothioate linkage
  modified_base 17: mod_base = OTHER; note = Locked nucleic acid with phosphorothioate linkage
  modified_base 18: mod_base = OTHER; note = 2'-O-methoxyethyl 5-methylcytosine with phosphorothioate linkage
  modified_base 19: mod_base = OTHER; note = 2'-O-methoxyethyl modified nucleotide with phosphorothioate linkage
  modified_base 20: mod_base = OTHER; note = 2'-O-methoxyethyl 5-methylcytosine
  misc_feature 1..5: note = RNA
  misc_feature 6..15: note = DNA
  misc_feature 16..20: note = RNA
aggtgaagcgaagtgcacac

SEQ ID NO: 537 - DNA, 20 bp, synthetic construct
  source 1..20: mol_type = other DNA
  modified_base 1: mod_base = OTHER; note = Locked nucleic acid with phosphorothioate linkage
  modified_base 2: mod_base = OTHER; note = 2'-O-methoxyethyl modified nucleotide with phosphorothioate linkage
  modified_base 3: mod_base = OTHER; note = 2'-O-methoxyethyl modified nucleotide with phosphorothioate linkage
  modified_base 4: mod_base = OTHER; note = 2'-O-methoxyethyl modified thymine with phosphorothioate linkage
  modified_base 5: mod_base = OTHER; note = 2'-O-methoxyethyl modified nucleotide with phosphorothioate linkage
  modified_base 6: mod_base = OTHER; note = Nucleotide with phosphorothioate linkage
  modified_base 7: mod_base = OTHER; note = Nucleotide with phosphorothioate linkage
  modified_base 8: mod_base = OTHER; note = Nucleotide with phosphorothioate linkage
  modified_base 9: mod_base = OTHER; note = 5-methylcytosine with phosphorothioate linkage
  modified_base 10: mod_base = OTHER; note = Nucleotide with phosphorothioate linkage
  modified_base 11: mod_base = OTHER; note = Nucleotide with phosphorothioate linkage
  modified_base 12: mod_base = OTHER; note = Nucleotide with phosphorothioate linkage
  modified_base 13: mod_base = OTHER; note = Nucleotide with phosphorothioate linkage
  modified_base 14: mod_base = OTHER; note = Thymine with phosphorothioate linkage
  modified_base 15: mod_base = OTHER; note = Nucleotide with phosphorothioate linkage
  modified_base 16: mod_base = OTHER; note = 2'-O-methoxyethyl 5-methylcytosine with phosphorothioate linkage
  modified_base 17: mod_base = OTHER; note = 2'-O-methoxyethyl modified nucleotide with phosphorothioate linkage
  modified_base 18: mod_base = OTHER; note = 2'-O-methoxyethyl 5-methylcytosine with phosphorothioate linkage
  modified_base 19: mod_base = OTHER; note = Locked nucleic acid with phosphorothioate linkage
  modified_base 20: mod_base = OTHER; note = 2'-O-methoxyethyl 5-methylcytosine
  misc_feature 1..5: note = RNA
  misc_feature 6..15: note = DNA
  misc_feature 16..20: note = RNA
aggtgaagcgaagtgcacac

SEQ ID NO: 538 - DNA, 20 bp, synthetic construct
  source 1..20: mol_type = other DNA
  modified_base 1: mod_base = OTHER; note = 2'-O-methoxyethyl modified nucleotide with phosphorothioate linkage
  modified_base 2: mod_base = OTHER; note = Locked nucleic acid with phosphorothioate linkage
  modified_base 3: mod_base = OTHER; note = Locked nucleic acid with phosphorothioate linkage
  modified_base 4: mod_base = OTHER; note = 2'-O-methoxyethyl modified thymine with phosphorothioate linkage
  modified_base 5: mod_base = OTHER; note = 2'-O-methoxyethyl modified nucleotide with phosphorothioate linkage
  modified_base 6: mod_base = OTHER; note = Nucleotide with phosphorothioate linkage
  modified_base 7: mod_base = OTHER; note = Nucleotide with phosphorothioate linkage
  modified_base 8: mod_base = OTHER; note = Nucleotide with phosphorothioate linkage
  modified_base 9: mod_base = OTHER; note = 5-methylcytosine with phosphorothioate linkage
  modified_base 10: mod_base = OTHER; note = Nucleotide with phosphorothioate linkage
  modified_base 11: mod_base = OTHER; note = Nucleotide with phosphorothioate linkage
  modified_base 12: mod_base = OTHER; note = Nucleotide with phosphorothioate linkage
  modified_base 13: mod_base = OTHER; note = Nucleotide with phosphorothioate linkage
  modified_base 14: mod_base = OTHER; note = Thymine with phosphorothioate linkage
  modified_base 15: mod_base = OTHER; note = Nucleotide with phosphorothioate linkage
  modified_base 16: mod_base = OTHER; note = 2'-O-methoxyethyl 5-methylcytosine with phosphorothioate linkage
  modified_base 17: mod_base = OTHER; note = 2'-O-methoxyethyl modified nucleotide with phosphorothioate linkage
  modified_base 18: mod_base = OTHER; note = 2'-O-methoxyethyl 5-methylcytosine with phosphorothioate linkage
  modified_base 19: mod_base = OTHER; note = 2'-O-methoxyethyl modified nucleotide with phosphorothioate linkage
  modified_base 20: mod_base = OTHER; note = 2'-O-methoxyethyl 5-methylcytosine
  misc_feature 1..5: note = RNA
  misc_feature 6..15: note = DNA
  misc_feature 16..20: note = RNA
aggtgaagcgaagtgcacac

SEQ ID NO: 539 - DNA, 20 bp, synthetic construct
  source 1..20: mol_type = other DNA
  modified_base 1: mod_base = OTHER; note = 2'-O-methoxyethyl modified nucleotide with phosphorothioate linkage
  modified_base 2: mod_base = OTHER; note = Locked nucleic acid with phosphorothioate linkage
  modified_base 3: mod_base = OTHER; note = 2'-O-methoxyethyl modified nucleotide with phosphorothioate linkage
  modified_base 4: mod_base = OTHER; note = 2'-O-methoxyethyl modified thymine with phosphorothioate linkage
  modified_base 5: mod_base = OTHER; note = Locked nucleic acid with phosphorothioate linkage
  modified_base 6: mod_base = OTHER; note = Nucleotide with phosphorothioate linkage
  modified_base 7: mod_base = OTHER; note = Nucleotide with phosphorothioate linkage
  modified_base 8: mod_base = OTHER; note = Nucleotide with phosphorothioate linkage
  modified_base 9: mod_base = OTHER; note = 5-methylcytosine with phosphorothioate linkage
  modified_base 10: mod_base = OTHER; note = Nucleotide with phosphorothioate linkage
  modified_base 11: mod_base = OTHER; note = Nucleotide with phosphorothioate linkage
  modified_base 12: mod_base = OTHER; note = Nucleotide with phosphorothioate linkage
  modified_base 13: mod_base = OTHER; note = Nucleotide with phosphorothioate linkage
  modified_base 14: mod_base = OTHER; note = Thymine with phosphorothioate linkage
  modified_base 15: mod_base = OTHER; note = Nucleotide with phosphorothioate linkage
  modified_base 16: mod_base = OTHER; note = 2'-O-methoxyethyl 5-methylcytosine with phosphorothioate linkage
  modified_base 17: mod_base = OTHER; note = 2'-O-methoxyethyl modified nucleotide with phosphorothioate linkage
  modified_base 18: mod_base = OTHER; note = 2'-O-methoxyethyl 5-methylcytosine with phosphorothioate linkage
  modified_base 19: mod_base = OTHER; note = 2'-O-methoxyethyl modified nucleotide with phosphorothioate linkage
  modified_base 20: mod_base = OTHER; note = 2'-O-methoxyethyl 5-methylcytosine
  misc_feature 1..5: note = RNA
  misc_feature 6..15: note = DNA
  misc_feature 16..20: note = RNA
aggtgaagcgaagtgcacac

SEQ ID NO: 540 - DNA, 20 bp, synthetic construct
  source 1..20: mol_type = other DNA
  modified_base 1: mod_base = OTHER; note = 2'-O-methoxyethyl modified nucleotide with phosphorothioate linkage
  modified_base 2: mod_base = OTHER; note = 2'-O-methoxyethyl modified nucleotide with phosphorothioate linkage
  modified_base 3: mod_base = OTHER; note = Locked nucleic acid with phosphorothioate linkage
  modified_base 4: mod_base = OTHER; note = 2'-O-methoxyethyl modified thymine with phosphorothioate linkage
  modified_base 5: mod_base = OTHER; note = Locked nucleic acid with phosphorothioate linkage
  modified_base 6: mod_base = OTHER; note = Nucleotide with phosphorothioate linkage
  modified_base 7: mod_base = OTHER; note = Nucleotide with phosphorothioate linkage
  modified_base 8: mod_base = OTHER; note = Nucleotide with phosphorothioate linkage
  modified_base 9: mod_base = OTHER; note = 5-methylcytosine with phosphorothioate linkage
  modified_base 10: mod_base = OTHER; note = Nucleotide with phosphorothioate linkage
  modified_base 11: mod_base = OTHER; note = Nucleotide with phosphorothioate linkage
  modified_base 12: mod_base = OTHER; note = Nucleotide with phosphorothioate linkage
  modified_base 13: mod_base = OTHER; note = Nucleotide with phosphorothioate linkage
  modified_base 14: mod_base = OTHER; note = Thymine with phosphorothioate linkage
  modified_base 15: mod_base = OTHER; note = Nucleotide with phosphorothioate linkage
  modified_base 16: mod_base = OTHER; note = 2'-O-methoxyethyl 5-methylcytosine with phosphorothioate linkage
  modified_base 17: mod_base = OTHER; note = 2'-O-methoxyethyl modified nucleotide with phosphorothioate linkage
  modified_base 18: mod_base = OTHER; note = 2'-O-methoxyethyl 5-methylcytosine with phosphorothioate linkage
  modified_base 19: mod_base = OTHER; note = 2'-O-methoxyethyl modified nucleotide with phosphorothioate linkage
  modified_base 20: mod_base = OTHER; note = 2'-O-methoxyethyl 5-methylcytosine
  misc_feature 1..5: note = RNA
  misc_feature 6..15: note = DNA
  misc_feature 16..20: note = RNA
aggtgaagcgaagtgcacac

SEQ ID NO: 541 - DNA, 20 bp, synthetic construct
  source 1..20: mol_type = other DNA
  modified_base 1: mod_base = OTHER; note = Locked nucleic acid with phosphorothioate linkage
  modified_base 2: mod_base = OTHER; note = Locked nucleic acid with phosphorothioate linkage
  modified_base 3: mod_base = OTHER; note = Locked nucleic acid with phosphorothioate linkage
  modified_base 4: mod_base = OTHER; note = 2'-O-methoxyethyl modified thymine with phosphorothioate linkage
  modified_base 5: mod_base = OTHER; note = 2'-O-methoxyethyl modified nucleotide with phosphorothioate linkage
  modified_base 6: mod_base = OTHER; note = Nucleotide with phosphorothioate linkage
  modified_base 7: mod_base = OTHER; note = Nucleotide with phosphorothioate linkage
  modified_base 8: mod_base = OTHER; note = Nucleotide with phosphorothioate linkage
  modified_base 9: mod_base = OTHER; note = 5-methylcytosine with phosphorothioate linkage
  modified_base 10: mod_base = OTHER; note = Nucleotide with phosphorothioate linkage
  modified_base 11: mod_base = OTHER; note = Nucleotide with phosphorothioate linkage
  modified_base 12: mod_base = OTHER; note = Nucleotide with phosphorothioate linkage
  modified_base 13: mod_base = OTHER; note = Nucleotide with phosphorothioate linkage
  modified_base 14: mod_base = OTHER; note = Thymine with phosphorothioate linkage
  modified_base 15: mod_base = OTHER; note = Nucleotide with phosphorothioate linkage
  modified_base 16: mod_base = OTHER; note = 2'-O-methoxyethyl 5-methylcytosine with phosphorothioate linkage
  modified_base 17: mod_base = OTHER; note = 2'-O-methoxyethyl modified nucleotide with phosphorothioate linkage
  modified_base 18: mod_base = OTHER; note = 2'-O-methoxyethyl 5-methylcytosine with phosphorothioate linkage
  modified_base 19: mod_base = OTHER; note = 2'-O-methoxyethyl modified nucleotide with phosphorothioate linkage
  modified_base 20: mod_base = OTHER; note = 2'-O-methoxyethyl 5-methylcytosine
  misc_feature 1..5: note = RNA
  misc_feature 6..15: note = DNA
  misc_feature 16..20: note = RNA
aggtgaagcgaagtgcacac

SEQ ID NO: 542 - DNA, 20 bp, synthetic construct
  source 1..20: mol_type = other DNA
  modified_base 1: mod_base = OTHER; note = Locked nucleic acid with phosphorothioate linkage
  modified_base 2: mod_base = OTHER; note = Locked nucleic acid with phosphorothioate linkage
  modified_base 3: mod_base = OTHER; note = 2'-O-methoxyethyl modified nucleotide with phosphorothioate linkage
  modified_base 4: mod_base = OTHER; note = 2'-O-methoxyethyl modified thymine with phosphorothioate linkage
  modified_base 5: mod_base = OTHER; note = Locked nucleic acid with phosphorothioate linkage
  modified_base 6: mod_base = OTHER; note = Nucleotide with phosphorothioate linkage
  modified_base 7: mod_base = OTHER; note = Nucleotide with phosphorothioate linkage
  modified_base 8: mod_base = OTHER; note = Nucleotide with phosphorothioate linkage
  modified_base 9: mod_base = OTHER; note = 5-methylcytosine with phosphorothioate linkage
  modified_base 10: mod_base = OTHER; note = Nucleotide with phosphorothioate linkage
  modified_base 11: mod_base = OTHER; note = Nucleotide with phosphorothioate linkage
  modified_base 12: mod_base = OTHER; note = Nucleotide with phosphorothioate linkage
  modified_base 13: mod_base = OTHER; note = Nucleotide with phosphorothioate linkage
  modified_base 14: mod_base = OTHER; note = Thymine with phosphorothioate linkage
  modified_base 15: mod_base = OTHER; note = Nucleotide with phosphorothioate linkage
  modified_base 16: mod_base = OTHER; note = 2'-O-methoxyethyl 5-methylcytosine with phosphorothioate linkage
  modified_base 17: mod_base = OTHER; note = 2'-O-methoxyethyl modified nucleotide with phosphorothioate linkage
  modified_base 18: mod_base = OTHER; note = 2'-O-methoxyethyl 5-methylcytosine with phosphorothioate linkage
  modified_base 19: mod_base = OTHER; note = 2'-O-methoxyethyl modified nucleotide with phosphorothioate linkage
  modified_base 20: mod_base = OTHER; note = 2'-O-methoxyethyl 5-methylcytosine
  misc_feature 1..5: note = RNA
  misc_feature 6..15: note = DNA
  misc_feature 16..20: note = RNA
aggtgaagcgaagtgcacac

SEQ ID NO: 543 - DNA, 20 bp, synthetic construct
  source 1..20: mol_type = other DNA
  modified_base 1: mod_base = OTHER; note = 2'-O-methoxyethyl modified nucleotide with phosphorothioate linkage
  modified_base 2: mod_base = OTHER; note = Locked nucleic acid with phosphorothioate linkage
  modified_base 3: mod_base = OTHER; note = Locked nucleic acid with phosphorothioate linkage
  modified_base 4: mod_base = OTHER; note = 2'-O-methoxyethyl modified thymine with phosphorothioate linkage
  modified_base 5: mod_base = OTHER; note = Locked nucleic acid with phosphorothioate linkage
  modified_base 6: mod_base = OTHER; note = Nucleotide with phosphorothioate linkage
  modified_base 7: mod_base = OTHER; note = Nucleotide with phosphorothioate linkage
  modified_base 8: mod_base = OTHER; note = Nucleotide with phosphorothioate linkage
  modified_base 9: mod_base = OTHER; note = 5-methylcytosine with phosphorothioate linkage
  modified_base 10: mod_base = OTHER; note = Nucleotide with phosphorothioate linkage
  modified_base 11: mod_base = OTHER; note = Nucleotide with phosphorothioate linkage
  modified_base 12: mod_base = OTHER; note = Nucleotide with phosphorothioate linkage
  modified_base 13: mod_base = OTHER; note = Nucleotide with phosphorothioate linkage
  modified_base 14: mod_base = OTHER; note = Thymine with phosphorothioate linkage
  modified_base 15: mod_base = OTHER; note = Nucleotide with phosphorothioate linkage
  modified_base 16: mod_base = OTHER; note = 2'-O-methoxyethyl 5-methylcytosine with phosphorothioate linkage
  modified_base 17: mod_base = OTHER; note = 2'-O-methoxyethyl modified nucleotide with phosphorothioate linkage
  modified_base 18: mod_base = OTHER; note = 2'-O-methoxyethyl 5-methylcytosine with phosphorothioate linkage
  modified_base 19: mod_base = OTHER; note = 2'-O-methoxyethyl modified nucleotide with phosphorothioate linkage
  modified_base 20: mod_base = OTHER; note = 2'-O-methoxyethyl 5-methylcytosine
  misc_feature 1..5: note = RNA
  misc_feature 6..15: note = DNA
  misc_feature 16..20: note = RNA
aggtgaagcgaagtgcacac

SEQ ID NO: 544 - DNA, 20 bp, synthetic construct
  source 1..20: mol_type = other DNA
  modified_base 1: mod_base = OTHER; note = Locked nucleic acid with phosphorothioate linkage
  modified_base 2: mod_base = OTHER; note = 2'-O-methoxyethyl modified nucleotide with phosphorothioate linkage
  modified_base 3: mod_base = OTHER; note = Locked nucleic acid with phosphorothioate linkage
  modified_base 4: mod_base = OTHER; note = 2'-O-methoxyethyl modified thymine with phosphorothioate linkage
  modified_base 5: mod_base = OTHER; note = Locked nucleic acid with phosphorothioate linkage
  modified_base 6: mod_base = OTHER; note = Nucleotide with phosphorothioate linkage
  modified_base 7: mod_base = OTHER; note = Nucleotide with phosphorothioate linkage
  modified_base 8: mod_base = OTHER; note = Nucleotide with phosphorothioate linkage
  modified_base 9: mod_base = OTHER; note = 5-methylcytosine with phosphorothioate linkage
  modified_base 10: mod_base = OTHER; note = Nucleotide with phosphorothioate linkage
  modified_base 11: mod_base = OTHER; note = Nucleotide with phosphorothioate linkage
  modified_base 12: mod_base = OTHER; note = Nucleotide with phosphorothioate linkage
  modified_base 13: mod_base = OTHER; note = Nucleotide with phosphorothioate linkage
  modified_base 14: mod_base = OTHER; note = Thymine with phosphorothioate linkage
  modified_base 15: mod_base = OTHER; note = Nucleotide with phosphorothioate linkage
  modified_base 16: mod_base = OTHER; note = 2'-O-methoxyethyl 5-methylcytosine with phosphorothioate linkage
  modified_base 17: mod_base = OTHER; note = 2'-O-methoxyethyl modified nucleotide with phosphorothioate linkage
  modified_base 18: mod_base = OTHER; note = 2'-O-methoxyethyl 5-methylcytosine with phosphorothioate linkage
  modified_base 19: mod_base = OTHER; note = 2'-O-methoxyethyl modified nucleotide with phosphorothioate linkage
  modified_base 20: mod_base = OTHER; note = 2'-O-methoxyethyl 5-methylcytosine
  misc_feature 1..5: note = RNA
  misc_feature 6..15: note = DNA
  misc_feature 16..20: note = RNA
aggtgaagcgaagtgcacac

SEQ ID NO: 545 - DNA, 20 bp, synthetic construct
  source 1..20: mol_type = other DNA
  modified_base 1: mod_base = OTHER; note = 2'-O-methoxyethyl modified nucleotide with phosphorothioate linkage
  modified_base 2: mod_base = OTHER; note = 2'-O-methoxyethyl modified nucleotide with phosphorothioate linkage
  modified_base 3: mod_base = OTHER; note = 2'-O-methoxyethyl modified nucleotide with phosphorothioate linkage
  modified_base 4: mod_base = OTHER; note = 2'-O-methoxyethyl modified thymine with phosphorothioate linkage
  modified_base 5: mod_base = OTHER; note = 2'-O-methoxyethyl modified nucleotide with phosphorothioate linkage
  modified_base 6: mod_base = OTHER; note = Nucleotide with phosphorothioate linkage
  modified_base 7: mod_base = OTHER; note = Nucleotide with phosphorothioate linkage
  modified_base 8: mod_base = OTHER; note = Nucleotide with phosphorothioate linkage
  modified_base 9: mod_base = OTHER; note = 5-methylcytosine with phosphorothioate linkage
  modified_base 10: mod_base = OTHER; note = Nucleotide with phosphorothioate linkage
  modified_base 11: mod_base = OTHER; note = Nucleotide with phosphorothioate linkage
  modified_base 12: mod_base = OTHER; note = Nucleotide with phosphorothioate linkage
  modified_base 13: mod_base = OTHER; note = Nucleotide with phosphorothioate linkage
  modified_base 14: mod_base = OTHER; note = Thymine with phosphorothioate linkage
  modified_base 15: mod_base = OTHER; note = Nucleotide with phosphorothioate linkage
  modified_base 16: mod_base = OTHER; note = Locked 5-methylcytosine with phosphorothioate linkage
  modified_base 17: mod_base = OTHER; note = Locked nucleic acid with phosphorothioate linkage
  modified_base 18: mod_base = OTHER; note = 2'-O-methoxyethyl 5-methylcytosine with phosphorothioate linkage
  modified_base 19: mod_base = OTHER; note = Locked nucleic acid with phosphorothioate linkage
  modified_base 20: mod_base = OTHER; note = 2'-O-methoxyethyl 5-methylcytosine
  misc_feature 1..5: note = RNA
  misc_feature 6..15: note = DNA
  misc_feature 16..20: note = RNA
aggtgaagcgaagtgcacac

SEQ ID NO: 546 - DNA, 20 bp, synthetic construct
  source 1..20: mol_type = other DNA
  modified_base 1: mod_base = OTHER; note = 2'-O-methoxyethyl modified nucleotide with phosphorothioate linkage
  modified_base 2: mod_base = OTHER; note = 2'-O-methoxyethyl modified nucleotide with phosphorothioate linkage
  modified_base 3: mod_base = OTHER; note = 2'-O-methoxyethyl modified nucleotide with phosphorothioate linkage
  modified_base 4: mod_base = OTHER; note = 2'-O-methoxyethyl modified thymine with phosphorothioate linkage
  modified_base 5: mod_base = OTHER; note = 2'-O-methoxyethyl modified nucleotide with phosphorothioate linkage
  modified_base 6: mod_base = OTHER; note = Nucleotide with phosphorothioate linkage
  modified_base 7: mod_base = OTHER; note = Nucleotide with phosphorothioate linkage
  modified_base 8: mod_base = OTHER; note = Nucleotide with phosphorothioate linkage
  modified_base 9: mod_base = OTHER; note = 5-methylcytosine with phosphorothioate linkage
  modified_base 10: mod_base = OTHER; note = Nucleotide with phosphorothioate linkage
  modified_base 11: mod_base = OTHER; note = Nucleotide with phosphorothioate linkage
  modified_base 12: mod_base = OTHER; note = Nucleotide with phosphorothioate linkage
  modified_base 13: mod_base = OTHER; note = Nucleotide with phosphorothioate linkage
  modified_base 14: mod_base = OTHER; note = Thymine with phosphorothioate linkage
  modified_base 15: mod_base = OTHER; note = Nucleotide with phosphorothioate linkage
  modified_base 16: mod_base = OTHER; note = Locked 5-methylcytosine with phosphorothioate linkage
  modified_base 17: mod_base = OTHER; note = Locked nucleic acid with phosphorothioate linkage
  modified_base 18: mod_base = OTHER; note = 2'-O-methoxyethyl 5-methylcytosine with phosphorothioate linkage
  modified_base 19: mod_base = OTHER; note = 2'-O-methoxyethyl modified nucleotide with phosphorothioate linkage
  modified_base 20: mod_base = OTHER; note = Locked 5-methylcytosine
  misc_feature 1..5: note = RNA
  misc_feature 6..15: note = DNA
  misc_feature 16..20: note = RNA
aggtgaagcgaagtgcacac

SEQ ID NO: 547 - DNA, 20 bp, synthetic construct
  source 1..20: mol_type = other DNA
  modified_base 1: mod_base = OTHER; note = 2'-O-methoxyethyl modified nucleotide with phosphorothioate linkage
  modified_base 2: mod_base = OTHER; note = 2'-O-methoxyethyl modified nucleotide with phosphorothioate linkage
  modified_base 3: mod_base = OTHER; note = 2'-O-methoxyethyl modified nucleotide with phosphorothioate linkage
  modified_base 4: mod_base = OTHER; note = 2'-O-methoxyethyl modified thymine with phosphorothioate linkage
  modified_base 5: mod_base = OTHER; note = 2'-O-methoxyethyl modified nucleotide with phosphorothioate linkage
  modified_base 6: mod_base = OTHER; note = Nucleotide with phosphorothioate linkage
  modified_base 7: mod_base = OTHER; note = Nucleotide with phosphorothioate linkage
  modified_base 8: mod_base = OTHER; note = Nucleotide with phosphorothioate linkage
  modified_base 9: mod_base = OTHER; note = 5-methylcytosine with phosphorothioate linkage
  modified_base 10: mod_base = OTHER; note = Nucleotide with phosphorothioate linkage
  modified_base 11: mod_base = OTHER; note = Nucleotide with phosphorothioate linkage
  modified_base 12: mod_base = OTHER; note = Nucleotide with phosphorothioate linkage
  modified_base 13: mod_base = OTHER; note = Nucleotide with phosphorothioate linkage
  modified_base 14: mod_base = OTHER; note = Thymine with phosphorothioate linkage
  modified_base 15: mod_base = OTHER; note = Nucleotide with phosphorothioate linkage
  modified_base 16: mod_base = OTHER; note = Locked 5-methylcytosine with phosphorothioate linkage
  modified_base 17: mod_base = OTHER; note = 2'-O-methoxyethyl modified nucleotide with phosphorothioate linkage
  modified_base 18: mod_base = OTHER; note = Locked 5-methylcytosine with phosphorothioate linkage
  modified_base 19: mod_base = OTHER; note = Locked nucleic acid with phosphorothioate linkage
  modified_base 20: mod_base = OTHER; note = 2'-O-methoxyethyl 5-methylcytosine
  misc_feature 1..5: note = RNA
  misc_feature 6..15: note = DNA
  misc_feature 16..20: note = RNA
aggtgaagcgaagtgcacac

SEQ ID NO: 548 - DNA, 20 bp, synthetic construct
  source 1..20: mol_type = other DNA
  modified_base 1: mod_base = OTHER; note = 2'-O-methoxyethyl modified nucleotide with phosphorothioate linkage
  modified_base 2: mod_base = OTHER; note = 2'-O-methoxyethyl modified nucleotide with phosphorothioate linkage
  modified_base 3: mod_base = OTHER; note = 2'-O-methoxyethyl modified nucleotide with phosphorothioate linkage
  modified_base 4: mod_base = OTHER; note = 2'-O-methoxyethyl modified thymine with phosphorothioate linkage
  modified_base 5: mod_base = OTHER; note = 2'-O-methoxyethyl modified nucleotide with phosphorothioate linkage
  modified_base 6: mod_base = OTHER; note = Nucleotide with phosphorothioate linkage
  modified_base 7: mod_base = OTHER; note = Nucleotide with phosphorothioate linkage
  modified_base 8: mod_base = OTHER; note = Nucleotide with phosphorothioate linkage
  modified_base 9: mod_base = OTHER; note = 5-methylcytosine with phosphorothioate linkage
  modified_base 10: mod_base = OTHER; note = Nucleotide with phosphorothioate linkage
  modified_base 11: mod_base = OTHER; note = Nucleotide with phosphorothioate linkage
  modified_base 12: mod_base = OTHER; note = Nucleotide with phosphorothioate linkage
  modified_base 13: mod_base = OTHER; note = Nucleotide with phosphorothioate linkage
  modified_base 14: mod_base = OTHER; note = Thymine with phosphorothioate linkage
  modified_base 15: mod_base = OTHER; note = Nucleotide with phosphorothioate linkage
  modified_base 16: mod_base = OTHER; note = Locked 5-methylcytosine with phosphorothioate linkage
  modified_base 17: mod_base = OTHER; note = 2'-O-methoxyethyl modified nucleotide with phosphorothioate linkage
  modified_base 18: mod_base = OTHER; note = Locked 5-methylcytosine with phosphorothioate linkage
  modified_base 19: mod_base = OTHER; note = 2'-O-methoxyethyl modified nucleotide with phosphorothioate linkage
  modified_base 20: mod_base = OTHER; note = Locked 5-methylcytosine
  misc_feature 1..5: note = RNA
  misc_feature 6..15: note = DNA
  misc_feature 16..20: note = RNA
aggtgaagcgaagtgcacac

SEQ ID NO: 549 - DNA, 20 bp, synthetic construct
  source 1..20: mol_type = other DNA
  modified_base 1: mod_base = OTHER; note = 2'-O-methoxyethyl modified nucleotide with phosphorothioate linkage
  modified_base 2: mod_base = OTHER; note = 2'-O-methoxyethyl modified nucleotide with phosphorothioate linkage
  modified_base 3: mod_base = OTHER; note = 2'-O-methoxyethyl modified nucleotide with phosphorothioate linkage
  modified_base 4: mod_base = OTHER; note = 2'-O-methoxyethyl modified thymine with phosphorothioate linkage
  modified_base 5: mod_base = OTHER; note = 2'-O-methoxyethyl modified nucleotide with phosphorothioate linkage
  modified_base 6: mod_base = OTHER; note = Nucleotide with phosphorothioate linkage
  modified_base 7: mod_base = OTHER; note = Nucleotide with phosphorothioate linkage
  modified_base 8: mod_base = OTHER; note = Nucleotide with phosphorothioate linkage
  modified_base 9: mod_base = OTHER; note = 5-methylcytosine with phosphorothioate linkage
  modified_base 10: mod_base = OTHER; note = Nucleotide with phosphorothioate linkage
  modified_base 11: mod_base = OTHER; note = Nucleotide with phosphorothioate linkage
  modified_base 12: mod_base = OTHER; note = Nucleotide with phosphorothioate linkage
  modified_base 13: mod_base = OTHER; note = Nucleotide with phosphorothioate linkage
  modified_base 14: mod_base = OTHER; note = Thymine with phosphorothioate linkage
  modified_base 15: mod_base = OTHER; note = Nucleotide with phosphorothioate linkage
  modified_base 16: mod_base = OTHER; note = 2'-O-methoxyethyl 5-methylcytosine with phosphorothioate linkage
  modified_base 17: mod_base = OTHER; note = Locked nucleic acid with phosphorothioate linkage
  modified_base 18: mod_base = OTHER; note = Locked 5-methylcytosine with phosphorothioate linkage
  modified_base 19: mod_base = OTHER; note = 2'-O-methoxyethyl modified nucleotide with phosphorothioate linkage
  modified_base 20: mod_base = OTHER; note = Locked 5-methylcytosine
  misc_feature 1..5: note = RNA
  misc_feature 6..15: note = DNA
  misc_feature 16..20: note = RNA
aggtgaagcgaagtgcacac

SEQ ID NO: 550 - DNA, 20 bp, synthetic construct
  source 1..20: mol_type = other DNA
  modified_base 1: mod_base = OTHER; note = Locked nucleic acid with phosphorothioate linkage
  modified_base 2: mod_base = OTHER; note = 2'-O-methoxyethyl modified nucleotide with phosphorothioate linkage
  modified_base 3: mod_base = OTHER; note = 2'-O-methoxyethyl modified nucleotide with phosphorothioate linkage
  modified_base 4: mod_base = OTHER; note = 2'-O-methoxyethyl modified thymine with phosphorothioate linkage
  modified_base 5: mod_base = OTHER; note = 2'-O-methoxyethyl modified nucleotide with phosphorothioate linkage
  modified_base 6: mod_base = OTHER; note = Nucleotide with phosphorothioate linkage
  modified_base 7: mod_base = OTHER; note = Nucleotide with phosphorothioate linkage
  modified_base 8: mod_base = OTHER; note = Nucleotide with phosphorothioate linkage
  modified_base 9: mod_base = OTHER; note = 5-methylcytosine with phosphorothioate linkage
  modified_base 10: mod_base = OTHER; note = Nucleotide with phosphorothioate linkage
  modified_base 11: mod_base = OTHER; note = Nucleotide with phosphorothioate linkage
  modified_base 12: mod_base = OTHER; note = Nucleotide with phosphorothioate linkage
  modified_base 13: mod_base = OTHER; note = Nucleotide with phosphorothioate linkage
  modified_base 14: mod_base = OTHER; note = Thymine with phosphorothioate linkage
  modified_base 15: mod_base = OTHER; note = Nucleotide with phosphorothioate linkage
  modified_base 16: mod_base = OTHER; note = 2'-O-methoxyethyl 5-methylcytosine with phosphorothioate linkage
  modified_base 17: mod_base = OTHER; note = Locked nucleic acid with phosphorothioate linkage
  modified_base 18: mod_base = OTHER; note = 2'-O-methoxyethyl 5-methylcytosine with phosphorothioate linkage
  modified_base 19: mod_base = OTHER; note = Locked nucleic acid with phosphorothioate linkage
  modified_base 20: mod_base = OTHER; note = 2'-O-methoxyethyl 5-methylcytosine
  misc_feature 1..5: note = RNA
  misc_feature 6..15: note = DNA
  misc_feature 16..20: note = RNA
aggtgaagcgaagtgcacac

SEQ ID NO: 551 - DNA, 20 bp, synthetic construct
  source 1..20: mol_type = other DNA
  modified_base 1: mod_base = OTHER; note = 2'-O-methoxyethyl modified nucleotide with phosphorothioate linkage
  modified_base 2: mod_base = OTHER; note = 2'-O-methoxyethyl modified nucleotide with phosphorothioate linkage
  modified_base 3: mod_base = OTHER; note = 2'-O-methoxyethyl modified nucleotide with phosphorothioate linkage
  modified_base 4: mod_base = OTHER; note = Locked thymine with phosphorothioate linkage
  modified_base 5: mod_base = OTHER; note = 2'-O-methoxyethyl modified nucleotide with phosphorothioate linkage
  modified_base 6: mod_base = OTHER; note = Nucleotide with phosphorothioate linkage
  modified_base 7: mod_base = OTHER; note = Nucleotide with phosphorothioate linkage
  modified_base 8: mod_base = OTHER; note = Nucleotide with phosphorothioate linkage
  modified_base 9: mod_base = OTHER; note = 5-methylcytosine with phosphorothioate linkage
  modified_base 10: mod_base = OTHER; note = Nucleotide with phosphorothioate linkage
  modified_base 11: mod_base = OTHER; note = Nucleotide with phosphorothioate linkage
  modified_base 12: mod_base = OTHER; note = Nucleotide with phosphorothioate linkage
  modified_base 13: mod_base = OTHER; note = Nucleotide with phosphorothioate linkage
  modified_base 14: mod_base = OTHER; note = Thymine with phosphorothioate linkage
  modified_base 15: mod_base = OTHER; note = Nucleotide with phosphorothioate linkage
  modified_base 16: mod_base = OTHER; note = Locked 5-methylcytosine with phosphorothioate linkage
  modified_base 17: mod_base = OTHER; note = 2'-O-methoxyethyl modified nucleotide with phosphorothioate linkage
  modified_base 18: mod_base = OTHER; note = Locked 5-methylcytosine with phosphorothioate linkage
  modified_base 19: mod_base = OTHER; note = 2'-O-methoxyethyl modified nucleotide with phosphorothioate linkage
  modified_base 20: mod_base = OTHER; note = 2'-O-methoxyethyl 5-methylcytosine
  misc_feature 1..5: note = RNA
  misc_feature 6..15: note = DNA
  misc_feature 16..20: note = RNA
aggtgaagcgaagtgcacac

SEQ ID NO: 552 - DNA, 20 bp, synthetic construct
  source 1..20: mol_type = other DNA
  modified_base 1: mod_base = OTHER; note = 2'-O-methoxyethyl modified nucleotide with phosphorothioate linkage
  modified_base 2: mod_base = OTHER; note = 2'-O-methoxyethyl modified nucleotide with phosphorothioate linkage
  modified_base 3: mod_base = OTHER; note = 2'-O-methoxyethyl modified nucleotide with phosphorothioate linkage
  modified_base 4: mod_base = OTHER; note = Locked thymine with phosphorothioate linkage
  modified_base 5: mod_base = OTHER; note = 2'-O-methoxyethyl modified nucleotide with phosphorothioate linkage
  modified_base 6: mod_base = OTHER; note = Nucleotide with phosphorothioate linkage
  modified_base 7: mod_base = OTHER; note = Nucleotide with phosphorothioate linkage
  modified_base 8: mod_base = OTHER; note = Nucleotide with phosphorothioate linkage
  modified_base 9: mod_base = OTHER; note = 5-methylcytosine with phosphorothioate linkage
  modified_base 10: mod_base = OTHER; note = Nucleotide with phosphorothioate linkage
  modified_base 11: mod_base = OTHER; note = Nucleotide with phosphorothioate linkage
  modified_base 12: mod_base = OTHER; note = Nucleotide with phosphorothioate linkage
  modified_base 13: mod_base = OTHER; note = Nucleotide with phosphorothioate linkage
  modified_base 14: mod_base = OTHER; note = Thymine with phosphorothioate linkage
  modified_base 15: mod_base = OTHER; note = Nucleotide with phosphorothioate linkage
  modified_base 16: mod_base = OTHER; note = Locked 5-methylcytosine with phosphorothioate linkage
  modified_base 17: mod_base = OTHER; note = 2'-O-methoxyethyl modified nucleotide with phosphorothioate linkage
  modified_base 18: mod_base = OTHER; note = 2'-O-methoxyethyl 5-methylcytosine with phosphorothioate linkage
  modified_base 19: mod_base = OTHER; note = 2'-O-methoxyethyl modified nucleotide with phosphorothioate linkage
  modified_base 20: mod_base = OTHER; note = Locked 5-methylcytosine
  misc_feature 1..5: note = RNA
  misc_feature 6..15: note = DNA
  misc_feature 16..20: note = RNA
aggtgaagcgaagtgcacac

SEQ ID NO: 553 - DNA, 20 bp, synthetic construct
  source 1..20: mol_type = other DNA
  modified_base 1: mod_base = OTHER; note = 2'-O-methoxyethyl modified nucleotide with phosphorothioate linkage
  modified_base 2: mod_base = OTHER; note = 2'-O-methoxyethyl modified nucleotide with phosphorothioate linkage
  modified_base 3: mod_base = OTHER; note = 2'-O-methoxyethyl modified nucleotide with phosphorothioate linkage
  modified_base 4: mod_base = OTHER; note = Locked thymine with phosphorothioate linkage
  modified_base 5: mod_base = OTHER; note = 2'-O-methoxyethyl modified nucleotide with phosphorothioate linkage
  modified_base 6: mod_base = OTHER; note = Nucleotide with phosphorothioate linkage
  modified_base 7: mod_base = OTHER; note = Nucleotide with phosphorothioate linkage
  modified_base 8: mod_base = OTHER; note = Nucleotide with phosphorothioate linkage
  modified_base 9: mod_base = OTHER; note = 5-methylcytosine with phosphorothioate linkage
  modified_base 10: mod_base = OTHER; note = Nucleotide with phosphorothioate linkage
  modified_base 11: mod_base = OTHER; note = Nucleotide with phosphorothioate linkage
  modified_base 12: mod_base = OTHER; note = Nucleotide with phosphorothioate linkage
  modified_base 13: mod_base = OTHER; note = Nucleotide with phosphorothioate linkage
  modified_base 14: mod_base = OTHER; note = Thymine with phosphorothioate linkage
  modified_base 15: mod_base = OTHER; note = Nucleotide with phosphorothioate linkage
  modified_base 16: mod_base = OTHER; note = 2'-O-methoxyethyl 5-methylcytosine with phosphorothioate linkage
  modified_base 17: mod_base = OTHER; note = 2'-O-methoxyethyl modified nucleotide with phosphorothioate linkage
  modified_base 18: mod_base = OTHER; note = Locked 5-methylcytosine with phosphorothioate linkage
  modified_base 19: mod_base = OTHER; note = 2'-O-methoxyethyl modified nucleotide with phosphorothioate linkage
  modified_base 20: mod_base = OTHER; note = Locked 5-methylcytosine
  misc_feature 1..5: note = RNA
  misc_feature 6..15: note = DNA
  misc_feature 16..20: note = RNA
aggtgaagcgaagtgcacac

SEQ ID NO: 554 - DNA, 20 bp, synthetic construct
  source 1..20: mol_type = other DNA
  modified_base 1: mod_base = OTHER; note = 2'-O-methoxyethyl modified nucleotide with phosphorothioate linkage
  modified_base 2: mod_base = OTHER; note = 2'-O-methoxyethyl modified nucleotide with phosphorothioate linkage
  modified_base 3: mod_base = OTHER; note = 2'-O-methoxyethyl modified nucleotide with phosphorothioate linkage
  modified_base 4: mod_base = OTHER; note = 2'-O-methoxyethyl modified thymine with phosphorothioate linkage
  modified_base 5: mod_base = OTHER; note = Locked nucleic acid with phosphorothioate linkage
  modified_base 6: mod_base = OTHER; note = Nucleotide with phosphorothioate linkage
  modified_base 7: mod_base = OTHER; note = Nucleotide with phosphorothioate linkage
  modified_base 8: mod_base = OTHER; note = Nucleotide with phosphorothioate linkage
  modified_base 9: mod_base = OTHER; note = 5-methylcytosine with phosphorothioate linkage
  modified_base 10: mod_base = OTHER; note = Nucleotide with phosphorothioate linkage
  modified_base 11: mod_base = OTHER; note = Nucleotide with phosphorothioate linkage
  modified_base 12: mod_base = OTHER; note = Nucleotide with phosphorothioate linkage
  modified_base 13: mod_base = OTHER; note = Nucleotide with phosphorothioate linkage
  modified_base 14: mod_base = OTHER; note = Thymine with phosphorothioate linkage
  modified_base 15: mod_base = OTHER; note = Nucleotide with phosphorothioate linkage
  modified_base 16: mod_base = OTHER; note = Locked 5-methylcytosine with phosphorothioate linkage
  modified_base 17: mod_base = OTHER; note = 2'-O-methoxyethyl modified nucleotide with phosphorothioate linkage
  modified_base 18: mod_base = OTHER; note = Locked 5-methylcytosine with phosphorothioate linkage
  modified_base 19: mod_base = OTHER; note = 2'-O-methoxyethyl modified nucleotide with phosphorothioate linkage
  modified_base 20: mod_base = OTHER; note = 2'-O-methoxyethyl 5-methylcytosine
  misc_feature 1..5: note = RNA
  misc_feature 6..15: note = DNA
  misc_feature 16..20: note = RNA
aggtgaagcgaagtgcacac

SEQ ID NO: 555 - DNA, 20 bp, synthetic construct
  source 1..20: mol_type = other DNA
  modified_base 1: mod_base = OTHER; note = 2'-O-methoxyethyl modified nucleotide with phosphorothioate linkage
  modified_base 2: mod_base = OTHER; note = 2'-O-methoxyethyl modified nucleotide with phosphorothioate linkage
  modified_base 3: mod_base = OTHER; note = 2'-O-methoxyethyl modified nucleotide with phosphorothioate linkage
  modified_base 4: mod_base = OTHER; note = 2'-O-methoxyethyl modified thymine with phosphorothioate linkage
  modified_base 5: mod_base = OTHER; note = Locked nucleic acid with phosphorothioate linkage
  modified_base 6: mod_base = OTHER; note = Nucleotide with phosphorothioate linkage
  modified_base 7: mod_base = OTHER; note = Nucleotide with phosphorothioate linkage
  modified_base 8: mod_base = OTHER; note = Nucleotide with phosphorothioate linkage
  modified_base 9: mod_base = OTHER; note = 5-methylcytosine with phosphorothioate linkage
  modified_base 10: mod_base = OTHER; note = Nucleotide with phosphorothioate linkage
  modified_base 11: mod_base = OTHER; note = Nucleotide with phosphorothioate linkage
  modified_base 12: mod_base = OTHER; note = Nucleotide with phosphorothioate linkage
  modified_base 13: mod_base = OTHER; note = Nucleotide with phosphorothioate linkage
  modified_base 14: mod_base = OTHER; note = Thymine with phosphorothioate linkage
  modified_base 15: mod_base = OTHER; note = Nucleotide with phosphorothioate linkage
  modified_base 16: mod_base = OTHER; note = Locked 5-methylcytosine with phosphorothioate linkage
  modified_base 17: mod_base = OTHER; note = 2'-O-methoxyethyl modified nucleotide with phosphorothioate linkage
  modified_base 18: mod_base = OTHER; note = 2'-O-methoxyethyl 5-methylcytosine with phosphorothioate linkage
  modified_base 19: mod_base = OTHER; note = 2'-O-methoxyethyl modified nucleotide with phosphorothioate linkage
  modified_base 20: mod_base = OTHER; note = Locked 5-methylcytosine
  misc_feature 1..5: note = RNA
  misc_feature 6..15: note = DNA
  misc_feature 16..20: note = RNA
aggtgaagcgaagtgcacac

SEQ ID NO: 556 - DNA, 20 bp, synthetic construct
  source 1..20: mol_type = other DNA
  modified_base 1: mod_base = OTHER; note = 2'-O-methoxyethyl modified nucleotide with phosphorothioate linkage
  modified_base 2: mod_base = OTHER; note = 2'-O-methoxyethyl modified nucleotide with phosphorothioate linkage
  modified_base 3: mod_base = OTHER; note = 2'-O-methoxyethyl modified nucleotide with phosphorothioate linkage
  modified_base 4: mod_base = OTHER; note = 2'-O-methoxyethyl modified thymine with phosphorothioate linkage
  modified_base 5: mod_base = OTHER; note = Locked nucleic acid with phosphorothioate linkage
  modified_base 6: mod_base = OTHER; note = Nucleotide with phosphorothioate linkage
  modified_base 7: mod_base = OTHER; note = Nucleotide with phosphorothioate linkage
  modified_base 8: mod_base = OTHER; note = Nucleotide with phosphorothioate linkage
  modified_base 9: mod_base = OTHER; note = 5-methylcytosine with phosphorothioate linkage
  modified_base 10: mod_base = OTHER; note = Nucleotide with phosphorothioate linkage
  modified_base 11: mod_base = OTHER; note = Nucleotide with phosphorothioate linkage
  modified_base 12: mod_base = OTHER; note = Nucleotide with phosphorothioate linkage
  modified_base 13: mod_base = OTHER; note = Nucleotide with phosphorothioate linkage
  modified_base 14: mod_base = OTHER; note = Thymine with phosphorothioate linkage
  modified_base 15: mod_base = OTHER; note = Nucleotide with phosphorothioate linkage
  modified_base 16: mod_base = OTHER; note = 2'-O-methoxyethyl 5-methylcytosine with phosphorothioate linkage
  modified_base 17: mod_base = OTHER; note = 2'-O-methoxyethyl modified nucleotide with phosphorothioate linkage
  modified_base 18: mod_base = OTHER; note = Locked 5-methylcytosine with phosphorothioate linkage
  modified_base 19: mod_base = OTHER; note = 2'-O-methoxyethyl modified nucleotide with phosphorothioate linkage
  modified_base 20: mod_base = OTHER; note = Locked 5-methylcytosine
  misc_feature 1..5: note = RNA
  misc_feature 6..15: note = DNA
  misc_feature 16..20: note = RNA
aggtgaagcgaagtgcacac

SEQ ID NO: 557 - DNA, 20 bp, synthetic construct
  source 1..20: mol_type = other DNA
  modified_base 1: mod_base = OTHER; note = Locked 5-methylcytosine with phosphorothioate linkage
  modified_base 2: mod_base = OTHER; note = 2'-O-methoxyethyl modified nucleotide with phosphorothioate linkage
  modified_base 3: mod_base = OTHER; note = 2'-O-methoxyethyl modified nucleotide with phosphorothioate linkage
  modified_base 4: mod_base = OTHER; note = 2'-O-methoxyethyl modified nucleotide with phosphorothioate linkage
  modified_base 5: mod_base = OTHER; note = 2'-O-methoxyethyl modified nucleotide with phosphorothioate linkage
  modified_base 6: mod_base = OTHER; note = 8-amino-guanosine with phosphorothioate linkage
  modified_base 7: mod_base = OTHER; note = Thymine with phosphorothioate linkage
  modified_base 8: mod_base = OTHER; note = Nucleotide with phosphorothioate linkage
  modified_base 9: mod_base = OTHER; note = Nucleotide with phosphorothioate linkage
  modified_base 10: mod_base = OTHER; note = Nucleotide with phosphorothioate linkage
  modified_base 11: mod_base = OTHER; note = Nucleotide with phosphorothioate linkage
  modified_base 12: mod_base = OTHER; note = 5-methylcytosine with phosphorothioate linkage
  modified_base 13: mod_base = OTHER; note = Nucleotide with phosphorothioate linkage
  modified_base 14: mod_base = OTHER; note = Nucleotide with phosphorothioate linkage
  modified_base 15: mod_base = OTHER; note = Nucleotide with phosphorothioate linkage
  modified_base 16: mod_base = OTHER; note = 2'-O-methoxyethyl modified nucleotide with phosphorothioate linkage
  modified_base 17: mod_base = OTHER; note = Locked thymine with phosphorothioate linkage
  modified_base 18: mod_base = OTHER; note = 2'-O-methoxyethyl modified nucleotide with phosphorothioate linkage
  modified_base 19: mod_base = OTHER; note = 2'-O-methoxyethyl 5-methylcytosine with phosphorothioate linkage
  modified_base 20: mod_base = OTHER; note = 2'-O-methoxyethyl modified nucleotide
  misc_feature 1..5: note = RNA
  misc_feature 6..15: note = DNA
  misc_feature 16..20: note = RNA
cagaggtgaagcgaagtgca

SEQ ID NO: 558 - DNA, 20 bp, synthetic construct
  source 1..20: mol_type = other DNA
  modified_base 1: mod_base = OTHER; note = Locked 5-methylcytosine with phosphorothioate linkage
  modified_base 2: mod_base = OTHER; note = 2'-O-methoxyethyl modified nucleotide with phosphorothioate linkage
  modified_base 3: mod_base = OTHER; note = 2'-O-methoxyethyl modified nucleotide with phosphorothioate linkage
  modified_base 4: mod_base = OTHER; note = 2'-O-methoxyethyl modified nucleotide with phosphorothioate linkage
  modified_base 5: mod_base = OTHER; note = 2'-O-methoxyethyl modified nucleotide with phosphorothioate linkage
  modified_base 6: mod_base = OTHER; note = Nucleotide with phosphorothioate linkage
  modified_base 7: mod_base = OTHER; note = 2-thio-thymine with phosphorothioate linkage
  modified_base 8: mod_base = OTHER; note = Nucleotide with phosphorothioate linkage
  modified_base 9: mod_base = OTHER; note = Nucleotide with phosphorothioate linkage
  modified_base 10: mod_base = OTHER; note = Nucleotide with phosphorothioate linkage
  modified_base 11: mod_base = OTHER; note = Nucleotide with phosphorothioate linkage
  modified_base 12: mod_base = OTHER; note = 5-methylcytosine with phosphorothioate linkage
  modified_base 13: mod_base = OTHER; note = Nucleotide with phosphorothioate linkage
  modified_base 14: mod_base = OTHER; note = Nucleotide with phosphorothioate linkage
  modified_base 15: mod_base = OTHER; note = Nucleotide with phosphorothioate linkage
  modified_base 16: mod_base = OTHER; note = 2'-O-methoxyethyl modified nucleotide with phosphorothioate linkage
  modified_base 17: mod_base = OTHER; note = Locked thymine with phosphorothioate linkage
  modified_base 18: mod_base = OTHER; note = 2'-O-methoxyethyl modified nucleotide with phosphorothioate linkage
  modified_base 19: mod_base = OTHER; note = 2'-O-methoxyethyl 5-methylcytosine with phosphorothioate linkage
  modified_base 20: mod_base = OTHER; note = 2'-O-methoxyethyl modified nucleotide
  misc_feature 1..5: note = RNA
  misc_feature 6..15: note = DNA
  misc_feature 16..20: note = RNA
cagaggtgaagcgaagtgca

SEQ ID NO: 559 - DNA, 20 bp, synthetic construct
  source 1..20: mol_type = other DNA
  modified_base 1: mod_base = OTHER; note = Locked 5-methylcytosine with phosphorothioate linkage
  modified_base 2: mod_base = OTHER; note = 2'-O-methoxyethyl modified nucleotide with phosphorothioate linkage
  modified_base 3: mod_base = OTHER; note = 2'-O-methoxyethyl modified nucleotide with phosphorothioate linkage
  modified_base 4: mod_base = OTHER; note = 2'-O-methoxyethyl modified nucleotide with phosphorothioate linkage
  modified_base 5: mod_base = OTHER; note = 2'-O-methoxyethyl modified nucleotide with phosphorothioate linkage
  modified_base 6: mod_base = OTHER; note = Nucleotide with phosphorothioate linkage
  modified_base 7: mod_base = OTHER; note = Thymine with phosphorothioate linkage
  modified_base 8: mod_base = OTHER; note = 8-amino-guanosine with phosphorothioate linkage
  modified_base 9: mod_base = OTHER; note = Nucleotide with phosphorothioate linkage
  modified_base 10: mod_base = OTHER; note = Nucleotide with phosphorothioate linkage
  modified_base 11: mod_base = OTHER; note = Nucleotide with phosphorothioate linkage
  modified_base 12: mod_base = OTHER; note = 5-methylcytosine with phosphorothioate linkage
  modified_base 13: mod_base = OTHER; note = Nucleotide with phosphorothioate linkage
  modified_base 14: mod_base = OTHER; note = Nucleotide with phosphorothioate linkage
  modified_base 15: mod_base = OTHER; note = Nucleotide with phosphorothioate linkage
  modified_base 16: mod_base = OTHER; note = 2'-O-methoxyethyl modified nucleotide with phosphorothioate linkage
  modified_base 17: mod_base = OTHER; note = Locked thymine with phosphorothioate linkage
  modified_base 18: mod_base = OTHER; note = 2'-O-methoxyethyl modified nucleotide with phosphorothioate linkage
  modified_base 19: mod_base = OTHER; note = 2'-O-methoxyethyl 5-methylcytosine with phosphorothioate linkage
  modified_base 20: mod_base = OTHER; note = 2'-O-methoxyethyl modified nucleotide
  misc_feature 1..5: note = RNA
  misc_feature 6..15: note = DNA
  misc_feature 16..20: note = RNA
cagaggtgaagcgaagtgca

SEQ ID NO: 560 - DNA, 20 bp, synthetic construct
  source 1..20: mol_type = other DNA
  modified_base 1: mod_base = OTHER; note = Locked 5-methylcytosine with phosphorothioate linkage
  modified_base 2: mod_base = OTHER; note = 2'-O-methoxyethyl modified nucleotide with phosphorothioate linkage
  modified_base 3: mod_base = OTHER; note = 2'-O-methoxyethyl modified nucleotide with phosphorothioate linkage
  modified_base 4: mod_base = OTHER; note = 2'-O-methoxyethyl modified nucleotide with phosphorothioate linkage
  modified_base 5: mod_base = OTHER; note = 2'-O-methoxyethyl modified nucleotide with phosphorothioate linkage
  modified_base 6: mod_base = OTHER; note = Nucleotide with phosphorothioate linkage
  modified_base 7: mod_base = OTHER; note = Thymine with phosphorothioate linkage
  modified_base 8: mod_base = OTHER; note = Nucleotide with phosphorothioate linkage
  modified_base 9: mod_base = OTHER; note = 8-amino-adenosine with phosphorothioate linkage
  modified_base 10: mod_base = OTHER; note = Nucleotide with phosphorothioate linkage
  modified_base 11: mod_base = OTHER; note = Nucleotide with phosphorothioate linkage
  modified_base 12: mod_base = OTHER; note = 5-methylcytosine with phosphorothioate linkage
  modified_base 13: mod_base = OTHER; note = Nucleotide with phosphorothioate linkage
  modified_base 14: mod_base = OTHER; note = Nucleotide with phosphorothioate linkage
  modified_base 15: mod_base = OTHER; note = Nucleotide with phosphorothioate linkage
  modified_base 16: mod_base = OTHER; note = 2'-O-methoxyethyl modified nucleotide with phosphorothioate linkage
  modified_base 17: mod_base = OTHER; note = Locked thymine with phosphorothioate linkage
  modified_base 18: mod_base = OTHER; note = 2'-O-methoxyethyl modified nucleotide with phosphorothioate linkage
  modified_base 19: mod_base = OTHER; note = 2'-O-methoxyethyl 5-methylcytosine with phosphorothioate linkage
  modified_base 20: mod_base = OTHER; note = 2'-O-methoxyethyl modified nucleotide
  misc_feature 1..5: note = RNA
  misc_feature 6..15: note = DNA
  misc_feature 16..20: note = RNA
cagaggtgaagcgaagtgca

SEQ ID NO: 561 - DNA, 20 bp, synthetic construct
  source 1..20: mol_type = other DNA
  modified_base 1: mod_base = OTHER; note = Locked 5-methylcytosine with phosphorothioate linkage
  modified_base 2: mod_base = OTHER; note = 2'-O-methoxyethyl modified nucleotide with phosphorothioate linkage
  modified_base 3: mod_base = OTHER; note = 2'-O-methoxyethyl modified nucleotide with phosphorothioate linkage
  modified_base 4: mod_base = OTHER; note = 2'-O-methoxyethyl modified nucleotide with phosphorothioate linkage
  modified_base 5: mod_base = OTHER; note = 2'-O-methoxyethyl modified nucleotide with phosphorothioate linkage
  modified_base 6: mod_base = OTHER; note = Nucleotide with phosphorothioate linkage
  modified_base 7: mod_base = OTHER; note = Thymine with phosphorothioate linkage
  modified_base 8: mod_base = OTHER; note = Nucleotide with phosphorothioate linkage
  modified_base 9: mod_base = OTHER; note = Nucleotide with phosphorothioate linkage
  modified_base 10: mod_base = OTHER; note = 8-amino-adenosine with phosphorothioate linkage
  modified_base 11: mod_base = OTHER; note = Nucleotide with phosphorothioate linkage
  modified_base 12: mod_base = OTHER; note = 5-methylcytosine with phosphorothioate linkage
  modified_base 13: mod_base = OTHER; note = Nucleotide with phosphorothioate linkage
  modified_base 14: mod_base = OTHER; note = Nucleotide with phosphorothioate linkage
  modified_base 15: mod_base = OTHER; note = Nucleotide with phosphorothioate linkage
  modified_base 16: mod_base = OTHER; note = 2'-O-methoxyethyl modified nucleotide with phosphorothioate linkage
  modified_base 17: mod_base = OTHER; note = Locked thymine with phosphorothioate linkage
  modified_base 18: mod_base = OTHER; note = 2'-O-methoxyethyl modified nucleotide with phosphorothioate linkage
  modified_base 19: mod_base = OTHER; note = 2'-O-methoxyethyl 5-methylcytosine with phosphorothioate linkage
  modified_base 20: mod_base = OTHER; note = 2'-O-methoxyethyl modified nucleotide
  misc_feature 1..5: note = RNA
  misc_feature 6..15: note = DNA
  misc_feature 16..20: note = RNA
cagaggtgaagcgaagtgca

SEQ ID NO: 562 - DNA, 20 bp, synthetic construct
  source 1..20: mol_type = other DNA
  modified_base 1: mod_base = OTHER; note = Locked 5-methylcytosine with phosphorothioate linkage
  modified_base 2: mod_base = OTHER; note = 2'-O-methoxyethyl modified nucleotide with phosphorothioate linkage
  modified_base 3: mod_base = OTHER; note = 2'-O-methoxyethyl modified nucleotide with phosphorothioate linkage
  modified_base 4: mod_base = OTHER; note = 2'-O-methoxyethyl modified nucleotide with phosphorothioate linkage
  modified_base 5: mod_base = OTHER; note = 2'-O-methoxyethyl modified nucleotide with phosphorothioate linkage
  modified_base 6: mod_base = OTHER; note = Nucleotide with phosphorothioate linkage
  modified_base 7: mod_base = OTHER; note = Thymine with phosphorothioate linkage
  modified_base 8: mod_base = OTHER; note = Nucleotide with phosphorothioate linkage
  modified_base 9: mod_base = OTHER; note = Nucleotide with phosphorothioate linkage
  modified_base 10: mod_base = OTHER; note = Nucleotide with phosphorothioate linkage
  modified_base 11: mod_base = OTHER; note = Nucleotide with phosphorothioate linkage
  modified_base 12: mod_base = OTHER; note = 5'-hydroxy-cytosine with phosphorothioate linkage
  modified_base 13: mod_base = OTHER; note = Nucleotide with phosphorothioate linkage
  modified_base 14: mod_base = OTHER; note = Nucleotide with phosphorothioate linkage
  modified_base 15: mod_base = OTHER; note = Nucleotide with phosphorothioate linkage
  modified_base 16: mod_base = OTHER; note = 2'-O-methoxyethyl modified nucleotide with phosphorothioate linkage
  modified_base 17: mod_base = OTHER; note = Locked thymine with phosphorothioate linkage
  modified_base 18: mod_base = OTHER; note = 2'-O-methoxyethyl modified nucleotide with phosphorothioate linkage
  modified_base 19: mod_base = OTHER; note = 2'-O-methoxyethyl 5-methylcytosine with phosphorothioate linkage
  modified_base 20: mod_base = OTHER; note = 2'-O-methoxyethyl modified nucleotide
  misc_feature 1..5: note = RNA
  misc_feature 6..15: note = DNA
  misc_feature 16..20: note = RNA
cagaggtgaagcgaagtgca

SEQ ID NO: 563 - DNA, 20 bp, synthetic construct
  source 1..20: mol_type = other DNA
  modified_base 1: mod_base = OTHER; note = Locked 5-methylcytosine with phosphorothioate linkage
  modified_base 2: mod_base = OTHER; note = 2'-O-methoxyethyl modified nucleotide with phosphorothioate linkage
  modified_base 3: mod_base = OTHER; note = 2'-O-methoxyethyl modified nucleotide with phosphorothioate linkage
  modified_base 4: mod_base = OTHER; note = 2'-O-methoxyethyl modified nucleotide with phosphorothioate linkage
  modified_base 5: mod_base = OTHER; note = 2'-O-methoxyethyl modified nucleotide with phosphorothioate linkage
  modified_base 6: mod_base = OTHER; note = Nucleotide with phosphorothioate linkage
  modified_base 7: mod_base = OTHER; note = Thymine with phosphorothioate linkage
  modified_base 8: mod_base = OTHER; note = Nucleotide with phosphorothioate linkage
  modified_base 9: mod_base = OTHER; note = Nucleotide with phosphorothioate linkage
  modified_base 10: mod_base = OTHER; note = Nucleotide with phosphorothioate linkage
  modified_base 11: mod_base = OTHER; note = Nucleotide with phosphorothioate linkage
  modified_base 12: mod_base = OTHER; note = 5-methylcytosine with phosphorothioate linkage
  modified_base 13: mod_base = OTHER; note = 8-amino-guanosine with phosphorothioate linkage
  modified_base 14: mod_base = OTHER; note = Nucleotide with phosphorothioate linkage
  modified_base 15: mod_base = OTHER; note = Nucleotide with phosphorothioate linkage
  modified_base 16: mod_base = OTHER; note = 2'-O-methoxyethyl modified nucleotide with phosphorothioate linkage
  modified_base 17: mod_base = OTHER; note = Locked thymine with phosphorothioate linkage
  modified_base 18: mod_base = OTHER; note = 2'-O-methoxyethyl modified nucleotide with phosphorothioate linkage
  modified_base 19: mod_base = OTHER; note = 2'-O-methoxyethyl 5-methylcytosine with phosphorothioate linkage
  modified_base 20: mod_base = OTHER; note = 2'-O-methoxyethyl modified nucleotide
  misc_feature 1..5: note = RNA
  misc_feature 6..15: note = DNA
  misc_feature 16..20: note = RNA
cagaggtgaagcgaagtgca

SEQ ID NO: 564 - DNA, 20 bp, synthetic construct
  source 1..20: mol_type = other DNA
  modified_base 1: mod_base = OTHER; note = Locked 5-methylcytosine with phosphorothioate linkage
  modified_base 2: mod_base = OTHER; note = 2'-O-methoxyethyl modified nucleotide with phosphorothioate linkage
  modified_base 3: mod_base = OTHER; note = 2'-O-methoxyethyl modified nucleotide with phosphorothioate linkage
  modified_base 4: mod_base = OTHER; note = 2'-O-methoxyethyl modified nucleotide with phosphorothioate linkage
  modified_base 5: mod_base = OTHER; note = 2'-O-methoxyethyl modified nucleotide with phosphorothioate linkage
  modified_base 6: mod_base = OTHER; note = Nucleotide with phosphorothioate linkage
  modified_base 7: mod_base = OTHER; note = Thymine with phosphorothioate linkage
  modified_base 8: mod_base = OTHER; note = Nucleotide with phosphorothioate linkage
  modified_base 9: mod_base = OTHER; note = Nucleotide with phosphorothioate linkage
  modified_base 10: mod_base = OTHER; note = Nucleotide with phosphorothioate linkage
  modified_base 11: mod_base = OTHER; note = Nucleotide with phosphorothioate linkage
  modified_base 12: mod_base = OTHER; note = 5-methylcytosine with phosphorothioate linkage
  modified_base 13: mod_base = OTHER; note = Nucleotide with phosphorothioate linkage
  modified_base 14: mod_base = OTHER; note = 8-amino-adenosine with phosphorothioate linkage
  modified_base 15: mod_base = OTHER; note = Nucleotide with phosphorothioate linkage
  modified_base 16: mod_base = OTHER; note = 2'-O-methoxyethyl modified nucleotide with phosphorothioate linkage
  modified_base 17: mod_base = OTHER; note = Locked thymine with phosphorothioate linkage
  modified_base 18: mod_base = OTHER; note = 2'-O-methoxyethyl modified nucleotide with phosphorothioate linkage
  modified_base 19: mod_base = OTHER; note = 2'-O-methoxyethyl 5-methylcytosine with phosphorothioate linkage
  modified_base 20: mod_base = OTHER; note = 2'-O-methoxyethyl modified nucleotide
  misc_feature 1..5: note = RNA
  misc_feature 6..15: note = DNA
  misc_feature 16..20: note = RNA
cagaggtgaagcgaagtgca

SEQ ID NO: 565 - DNA, 20 bp, synthetic construct
  source 1..20: mol_type = other DNA
  modified_base 1: mod_base = OTHER; note = Locked 5-methylcytosine with phosphorothioate linkage
  modified_base 2: mod_base = OTHER; note = 2'-O-methoxyethyl modified nucleotide with phosphorothioate linkage
  modified_base 3: mod_base = OTHER; note = 2'-O-methoxyethyl modified nucleotide with phosphorothioate linkage
  modified_base 4: mod_base = OTHER; note = 2'-O-methoxyethyl modified nucleotide with phosphorothioate linkage
  modified_base 5: mod_base = OTHER; note = 2'-O-methoxyethyl modified nucleotide with phosphorothioate linkage
  modified_base 6: mod_base = OTHER; note = Nucleotide with phosphorothioate linkage
  modified_base 7: mod_base = OTHER; note = Thymine with phosphorothioate linkage
  modified_base 8: mod_base = OTHER; note = Nucleotide with phosphorothioate linkage
  modified_base 9: mod_base = OTHER; note = Nucleotide with phosphorothioate linkage
  modified_base 10: mod_base = OTHER; note = Nucleotide with phosphorothioate linkage
  modified_base 11: mod_base = OTHER; note = Nucleotide with phosphorothioate linkage
  modified_base 12: mod_base = OTHER; note = 5-methylcytosine with phosphorothioate linkage
  modified_base 13: mod_base = OTHER; note = Nucleotide with phosphorothioate linkage
  modified_base 14: mod_base = OTHER; note = Nucleotide with phosphorothioate linkage
  modified_base 15: mod_base = OTHER; note = 8-amino-adenosine with phosphorothioate linkage
  modified_base 16: mod_base = OTHER; note = 2'-O-methoxyethyl modified nucleotide with phosphorothioate linkage
  modified_base 17: mod_base = OTHER; note = Locked thymine with phosphorothioate linkage
  modified_base 18: mod_base = OTHER; note = 2'-O-methoxyethyl modified nucleotide with phosphorothioate linkage
  modified_base 19: mod_base = OTHER; note = 2'-O-methoxyethyl 5-methylcytosine with phosphorothioate linkage
  modified_base 20: mod_base = OTHER; note = 2'-O-methoxyethyl modified nucleotide
  misc_feature 1..5: note = RNA
  misc_feature 6..15: note = DNA
  misc_feature 16..20: note = RNA
cagaggtgaagcgaagtgca

SEQ ID NO: 566 - DNA, 20 bp, synthetic construct
  source 1..20: mol_type = other DNA
  modified_base 1: mod_base = OTHER; note = Locked 5-methylcytosine with phosphorothioate linkage
  modified_base 2: mod_base = OTHER; note = Locked nucleic acid with phosphorothioate linkage
  modified_base 3: mod_base = OTHER; note = 2'-O-methoxyethyl modified nucleotide with phosphorothioate linkage
  modified_base 4: mod_base = OTHER; note = 2'-O-methoxyethyl modified nucleotide with phosphorothioate linkage
  modified_base 5: mod_base = OTHER; note = 2'-O-methoxyethyl modified nucleotide with phosphorothioate linkage
  modified_base 6: mod_base = OTHER; note = Nucleotide with phosphorothioate linkage
  modified_base 7: mod_base = OTHER; note = Thymine with phosphorothioate linkage
  modified_base 8: mod_base = OTHER; note = Nucleotide with phosphorothioate linkage
  modified_base 9: mod_base = OTHER; note = Nucleotide with phosphorothioate linkage
  modified_base 10: mod_base = OTHER; note = Nucleotide with phosphorothioate linkage
  modified_base 11: mod_base = OTHER; note = Nucleotide with phosphorothioate linkage
  modified_base 12: mod_base = OTHER; note = 5-methylcytosine with phosphorothioate linkage
  modified_base 13: mod_base = OTHER; note = Nucleotide with phosphorothioate linkage
  modified_base 14: mod_base = OTHER; note = Nucleotide with phosphorothioate linkage
  modified_base 15: mod_base = OTHER; note = Nucleotide with phosphorothioate linkage
  modified_base 16: mod_base = OTHER; note = 2'-O-methoxyethyl modified nucleotide with phosphorothioate linkage
  modified_base 17: mod_base = OTHER; note = 2'-O-methoxyethyl modified thymine with phosphorothioate linkage
  modified_base 18: mod_base = OTHER; note = 2'-O-methoxyethyl modified nucleotide with phosphorothioate linkage
  modified_base 19: mod_base = OTHER; note = 2'-O-methoxyethyl 5-methylcytosine with phosphorothioate linkage
  modified_base 20: mod_base = OTHER; note = 2'-O-methoxyethyl modified nucleotide
  misc_feature 1..5: note = RNA
  misc_feature 6..15: note = DNA
  misc_feature 16..20: note = RNA
cagaggtgaagcgaagtgca

SEQ ID NO: 567 - DNA, 20 bp, synthetic construct
  source 1..20: mol_type = other DNA
  modified_base 1: mod_base = OTHER; note = Locked 5-methylcytosine with phosphorothioate linkage
  modified_base 2: mod_base = OTHER; note = 2'-O-methoxyethyl modified nucleotide with phosphorothioate linkage
  modified_base 3: mod_base = OTHER; note = Locked nucleic acid with phosphorothioate linkage
  modified_base 4: mod_base = OTHER; note = 2'-O-methoxyethyl modified nucleotide with phosphorothioate linkage
  modified_base 5: mod_base = OTHER; note = 2'-O-methoxyethyl modified nucleotide with phosphorothioate linkage
  modified_base 6: mod_base = OTHER; note = Nucleotide with phosphorothioate linkage
  modified_base 7: mod_base = OTHER; note = Thymine with phosphorothioate linkage
  modified_base 8: mod_base = OTHER; note = Nucleotide with phosphorothioate linkage
  modified_base 9: mod_base = OTHER; note = Nucleotide with phosphorothioate linkage
  modified_base 10: mod_base = OTHER; note = Nucleotide with phosphorothioate linkage
  modified_base 11: mod_base = OTHER; note = Nucleotide with phosphorothioate linkage
  modified_base 12: mod_base = OTHER; note = 5-methylcytosine with phosphorothioate linkage
  modified_base 13: mod_base = OTHER; note = Nucleotide with phosphorothioate linkage
  modified_base 14: mod_base = OTHER; note = Nucleotide with phosphorothioate linkage
  modified_base 15: mod_base = OTHER; note = Nucleotide with phosphorothioate linkage
  modified_base 16: mod_base = OTHER; note = 2'-O-methoxyethyl modified nucleotide with phosphorothioate linkage
  modified_base 17: mod_base = OTHER; note = 2'-O-methoxyethyl modified thymine with phosphorothioate linkage
  modified_base 18: mod_base = OTHER; note = 2'-O-methoxyethyl modified nucleotide with phosphorothioate linkage
  modified_base 19: mod_base = OTHER; note = 2'-O-methoxyethyl 5-methylcytosine with phosphorothioate linkage
  modified_base 20: mod_base = OTHER; note = 2'-O-methoxyethyl modified nucleotide
  misc_feature 1..5: note = RNA
  misc_feature 6..15: note = DNA
  misc_feature 16..20: note = RNA
cagaggtgaagcgaagtgca

SEQ ID NO: 568 - DNA, 20 bp, synthetic construct
  source 1..20: mol_type = other DNA
  modified_base 1: mod_base = OTHER; note = Locked 5-methylcytosine with phosphorothioate linkage
  modified_base 2: mod_base = OTHER; note = 2'-O-methoxyethyl modified nucleotide with phosphorothioate linkage
  modified_base 3: mod_base = OTHER; note = 2'-O-methoxyethyl modified nucleotide with phosphorothioate linkage
  modified_base 4: mod_base = OTHER; note = Locked nucleic acid with phosphorothioate linkage
  modified_base 5: mod_base = OTHER; note = 2'-O-methoxyethyl modified nucleotide with phosphorothioate linkage
  modified_base 6: mod_base = OTHER; note = Nucleotide with phosphorothioate linkage
  modified_base 7: mod_base = OTHER; note = Thymine with phosphorothioate linkage
  modified_base 8: mod_base = OTHER; note = Nucleotide with phosphorothioate linkage
  modified_base 9: mod_base = OTHER; note = Nucleotide with phosphorothioate linkage
  modified_base 10: mod_base = OTHER; note = Nucleotide with phosphorothioate linkage
  modified_base 11: mod_base = OTHER; note = Nucleotide with phosphorothioate linkage
  modified_base 12: mod_base = OTHER; note = 5-methylcytosine with phosphorothioate linkage
  modified_base 13: mod_base = OTHER; note = Nucleotide with phosphorothioate linkage
  modified_base 14: mod_base = OTHER; note = Nucleotide with phosphorothioate linkage
  modified_base 15: mod_base = OTHER; note = Nucleotide with phosphorothioate linkage
  modified_base 16: mod_base = OTHER; note = 2'-O-methoxyethyl modified nucleotide with phosphorothioate linkage
  modified_base 17: mod_base = OTHER; note = 2'-O-methoxyethyl modified thymine with phosphorothioate linkage
  modified_base 18: mod_base = OTHER; note = 2'-O-methoxyethyl modified nucleotide with phosphorothioate linkage
  modified_base 19: mod_base = OTHER; note = 2'-O-methoxyethyl 5-methylcytosine with phosphorothioate linkage
  modified_base 20: mod_base = OTHER; note = 2'-O-methoxyethyl modified nucleotide
  misc_feature 1..5: note = RNA
  misc_feature 6..15: note = DNA
  misc_feature 16..20: note = RNA
cagaggtgaagcgaagtgca

SEQ ID NO: 569 - DNA, 20 bp, synthetic construct
  source 1..20: mol_type = other DNA
  modified_base 1: mod_base = OTHER; note = Locked 5-methylcytosine with phosphorothioate linkage
  modified_base 2: mod_base = OTHER; note = 2'-O-methoxyethyl modified nucleotide with phosphorothioate linkage
  modified_base 3: mod_base = OTHER; note = 2'-O-methoxyethyl modified nucleotide with phosphorothioate linkage
  modified_base 4: mod_base = OTHER; note = 2'-O-methoxyethyl modified nucleotide with phosphorothioate linkage
  modified_base 5: mod_base = OTHER; note = Locked nucleic acid with phosphorothioate linkage
  modified_base 6: mod_base = OTHER; note = Nucleotide with phosphorothioate linkage
  modified_base 7: mod_base = OTHER; note = Thymine with phosphorothioate linkage
  modified_base 8: mod_base = OTHER; note = Nucleotide with phosphorothioate linkage
  modified_base 9: mod_base = OTHER; note = Nucleotide with phosphorothioate linkage
  modified_base 10: mod_base = OTHER; note = Nucleotide with phosphorothioate linkage
  modified_base 11: mod_base = OTHER; note = Nucleotide with phosphorothioate linkage
  modified_base 12: mod_base = OTHER; note = 5-methylcytosine with phosphorothioate linkage
  modified_base 13: mod_base = OTHER; note = Nucleotide with phosphorothioate linkage
  modified_base 14: mod_base = OTHER; note = Nucleotide with phosphorothioate linkage
  modified_base 15: mod_base = OTHER; note = Nucleotide with phosphorothioate linkage
  modified_base 16: mod_base = OTHER; note = 2'-O-methoxyethyl modified nucleotide with phosphorothioate linkage
  modified_base 17: mod_base = OTHER; note = 2'-O-methoxyethyl modified thymine with phosphorothioate linkage
  modified_base 18: mod_base = OTHER; note = 2'-O-methoxyethyl modified nucleotide with phosphorothioate linkage
  modified_base 19: mod_base = OTHER; note = 2'-O-methoxyethyl 5-methylcytosine with phosphorothioate linkage
  modified_base 20: mod_base = OTHER; note = 2'-O-methoxyethyl modified nucleotide
  misc_feature 1..5: note = RNA
  misc_feature 6..15: note = DNA
  misc_feature 16..20: note = RNA
cagaggtgaagcgaagtgca

SEQ ID NO: 570 - DNA, 20 bp, synthetic construct
  source 1..20: mol_type = other DNA
  modified_base 1: mod_base = OTHER; note = Locked 5-methylcytosine with phosphorothioate linkage
  modified_base 2: mod_base = OTHER; note = 2'-O-methoxyethyl modified nucleotide with phosphorothioate linkage
  modified_base 3: mod_base = OTHER; note = 2'-O-methoxyethyl modified nucleotide with phosphorothioate linkage
  modified_base 4: mod_base = OTHER; note = 2'-O-methoxyethyl modified nucleotide with phosphorothioate linkage
  modified_base 5: mod_base = OTHER; note = 2'-O-methoxyethyl modified nucleotide with phosphorothioate linkage
  modified_base 6: mod_base = OTHER; note = Nucleotide with phosphorothioate linkage
  modified_base 7: mod_base = OTHER; note = Thymine with phosphorothioate linkage
  modified_base 8: mod_base = OTHER; note = Nucleotide with phosphorothioate linkage
  modified_base 9: mod_base = OTHER; note = Nucleotide with phosphorothioate linkage
  modified_base 10: mod_base = OTHER; note = Nucleotide with phosphorothioate linkage
  modified_base 11: mod_base = OTHER; note = Nucleotide with phosphorothioate linkage
  modified_base 12: mod_base = OTHER; note = 5-methylcytosine with phosphorothioate linkage
  modified_base 13: mod_base = OTHER; note = Nucleotide with phosphorothioate linkage
  modified_base 14: mod_base = OTHER; note = Nucleotide with phosphorothioate linkage
  modified_base 15: mod_base = OTHER; note = Nucleotide with phosphorothioate linkage
  modified_base 16: mod_base = OTHER; note = Locked nucleic acid with phosphorothioate linkage
  modified_base 17: mod_base = OTHER; note = 2'-O-methoxyethyl modified thymine with phosphorothioate linkage
  modified_base 18: mod_base = OTHER; note = 2'-O-methoxyethyl modified nucleotide with phosphorothioate linkage
  modified_base 19: mod_base = OTHER; note = 2'-O-methoxyethyl 5-methylcytosine with phosphorothioate linkage
  modified_base 20: mod_base = OTHER; note = 2'-O-methoxyethyl modified nucleotide
  misc_feature 1..5: note = RNA
  misc_feature 6..15: note = DNA
  misc_feature 16..20: note = RNA
cagaggtgaagcgaagtgca

SEQ ID NO: 571 - DNA, 20 bp, synthetic construct
  source 1..20: mol_type = other DNA
  modified_base 1: mod_base = OTHER; note = Locked 5-methylcytosine with phosphorothioate linkage
  modified_base 2: mod_base = OTHER; note = 2'-O-methoxyethyl modified nucleotide with phosphorothioate linkage
  modified_base 3: mod_base = OTHER; note = 2'-O-methoxyethyl modified nucleotide with phosphorothioate linkage
  modified_base 4: mod_base = OTHER; note = 2'-O-methoxyethyl modified nucleotide with phosphorothioate linkage
  modified_base 5: mod_base = OTHER; note = 2'-O-methoxyethyl modified nucleotide with phosphorothioate linkage
  modified_base 6: mod_base = OTHER; note = Nucleotide with phosphorothioate linkage
  modified_base 7: mod_base = OTHER; note = Thymine with phosphorothioate linkage
  modified_base 8: mod_base = OTHER; note = Nucleotide with phosphorothioate linkage
  modified_base 9: mod_base = OTHER; note = Nucleotide with phosphorothioate linkage
  modified_base 10: mod_base = OTHER; note = Nucleotide with phosphorothioate linkage
  modified_base 11: mod_base = OTHER; note = Nucleotide with phosphorothioate linkage
  modified_base 12: mod_base = OTHER; note = 5-methylcytosine with phosphorothioate linkage
  modified_base 13: mod_base = OTHER; note = Nucleotide with phosphorothioate linkage
  modified_base 14: mod_base = OTHER; note = Nucleotide with phosphorothioate linkage
  modified_base 15: mod_base = OTHER; note = Nucleotide with phosphorothioate linkage
  modified_base 16: mod_base = OTHER; note = 2'-O-methoxyethyl modified nucleotide with phosphorothioate linkage
  modified_base 17: mod_base = OTHER; note = 2'-O-methoxyethyl modified thymine with phosphorothioate linkage
  modified_base 18: mod_base = OTHER; note = Locked nucleic acid with phosphorothioate linkage
  modified_base 19: mod_base = OTHER; note = 2'-O-methoxyethyl 5-methylcytosine with phosphorothioate linkage
  modified_base 20: mod_base = OTHER; note = 2'-O-methoxyethyl modified nucleotide
  misc_feature 1..5: note = RNA
  misc_feature 6..15: note = DNA
  misc_feature 16..20: note = RNA
cagaggtgaagcgaagtgca

SEQ ID NO: 572 - DNA, 20 bp, synthetic construct
  source 1..20: mol_type = other DNA
  modified_base 1: mod_base = OTHER; note = Locked 5-methylcytosine with phosphorothioate linkage
  modified_base 2: mod_base = OTHER; note = 2'-O-methoxyethyl modified nucleotide with phosphorothioate linkage
  modified_base 3: mod_base = OTHER; note = 2'-O-methoxyethyl modified nucleotide with phosphorothioate linkage
  modified_base 4: mod_base = OTHER; note = 2'-O-methoxyethyl modified nucleotide with phosphorothioate linkage
  modified_base 5: mod_base = OTHER; note = 2'-O-methoxyethyl modified nucleotide with phosphorothioate linkage
  modified_base 6: mod_base = OTHER; note = Nucleotide with phosphorothioate linkage
  modified_base 7: mod_base = OTHER; note = Thymine with phosphorothioate linkage
  modified_base 8: mod_base = OTHER; note = Nucleotide with phosphorothioate linkage
  modified_base 9: mod_base = OTHER; note = Nucleotide with phosphorothioate linkage
  modified_base 10: mod_base = OTHER; note = Nucleotide with phosphorothioate linkage
  modified_base 11: mod_base = OTHER; note = Nucleotide with phosphorothioate linkage
  modified_base 12: mod_base = OTHER; note = 5-methylcytosine with phosphorothioate linkage
  modified_base 13: mod_base = OTHER; note = Nucleotide with phosphorothioate linkage
  modified_base 14: mod_base = OTHER; note = Nucleotide with phosphorothioate linkage
  modified_base 15: mod_base = OTHER; note = Nucleotide with phosphorothioate linkage
  modified_base 16: mod_base = OTHER; note = 2'-O-methoxyethyl modified nucleotide with phosphorothioate linkage
  modified_base 17: mod_base = OTHER; note = 2'-O-methoxyethyl modified thymine with phosphorothioate linkage
  modified_base 18: mod_base = OTHER; note = 2'-O-methoxyethyl modified nucleotide with phosphorothioate linkage
  modified_base 19: mod_base = OTHER; note = 2'-O-methoxyethyl 5-methylcytosine with phosphorothioate linkage
  modified_base 20: mod_base = OTHER; note = Locked nucleic acid
  misc_feature 1..5: note = RNA
  misc_feature 6..15: note = DNA
  misc_feature 16..20: note = RNA
cagaggtgaagcgaagtgca

SEQ ID NO: 573 - DNA, 20 bp, synthetic construct
  source 1..20: mol_type = other DNA
  modified_base 1: mod_base = OTHER; note = 2'-O-methoxyethyl 5-methylcytosine with phosphorothioate linkage
  modified_base 2: mod_base = OTHER; note = Locked nucleic acid with phosphorothioate linkage
  modified_base 3: mod_base = OTHER; note = Locked nucleic acid with phosphorothioate linkage
  modified_base 4: mod_base = OTHER; note = 2'-O-methoxyethyl modified nucleotide with phosphorothioate linkage
  modified_base 5: mod_base = OTHER; note = 2'-O-methoxyethyl modified nucleotide with phosphorothioate linkage
  modified_base 6: mod_base = OTHER; note = Nucleotide with phosphorothioate linkage
  modified_base 7: mod_base = OTHER; note = Thymine with phosphorothioate linkage
  modified_base 8: mod_base = OTHER; note = Nucleotide with phosphorothioate linkage
  modified_base 9: mod_base = OTHER; note = Nucleotide with phosphorothioate linkage
  modified_base 10: mod_base = OTHER; note = Nucleotide with phosphorothioate linkage
  modified_base 11: mod_base = OTHER; note = Nucleotide with phosphorothioate linkage
  modified_base 12: mod_base = OTHER; note = 5-methylcytosine with phosphorothioate linkage
  modified_base 13: mod_base = OTHER; note = Nucleotide with phosphorothioate linkage
  modified_base 14: mod_base = OTHER; note = Nucleotide with phosphorothioate linkage
  modified_base 15: mod_base = OTHER; note = Nucleotide with phosphorothioate linkage
  modified_base 16: mod_base = OTHER; note = 2'-O-methoxyethyl modified nucleotide with phosphorothioate linkage
  modified_base 17: mod_base = OTHER; note = 2'-O-methoxyethyl modified thymine with phosphorothioate linkage
  modified_base 18: mod_base = OTHER; note = 2'-O-methoxyethyl modified nucleotide with phosphorothioate linkage
  modified_base 19: mod_base = OTHER; note = 2'-O-methoxyethyl 5-methylcytosine with phosphorothioate linkage
  modified_base 20: mod_base = OTHER; note = 2'-O-methoxyethyl modified nucleotide
  misc_feature 1..5: note = RNA
  misc_feature 6..15: note = DNA
  misc_feature 16..20: note = RNA
cagaggtgaagcgaagtgca

SEQ ID NO: 574 - DNA, 20 bp, synthetic construct
  source 1..20: mol_type = other DNA
  modified_base 1: mod_base = OTHER; note = 2'-O-methoxyethyl 5-methylcytosine with phosphorothioate linkage
  modified_base 2: mod_base = OTHER; note = Locked nucleic acid with phosphorothioate linkage
  modified_base 3: mod_base = OTHER; note = 2'-O-methoxyethyl modified nucleotide with phosphorothioate linkage
  modified_base 4: mod_base = OTHER; note = 2'-O-methoxyethyl modified nucleotide with phosphorothioate linkage
  modified_base 5: mod_base = OTHER; note = Locked nucleic acid with phosphorothioate linkage
  modified_base 6: mod_base = OTHER; note = Nucleotide with phosphorothioate linkage
  modified_base 7: mod_base = OTHER; note = Thymine with phosphorothioate linkage
  modified_base 8: mod_base = OTHER; note = Nucleotide with phosphorothioate linkage
  modified_base 9: mod_base = OTHER; note = Nucleotide with phosphorothioate linkage
  modified_base 10: mod_base = OTHER; note = Nucleotide with phosphorothioate linkage
  modified_base 11: mod_base = OTHER; note = Nucleotide with phosphorothioate linkage
  modified_base 12: mod_base = OTHER; note = 5-methylcytosine with phosphorothioate linkage
  modified_base 13: mod_base = OTHER; note = Nucleotide with phosphorothioate linkage
  modified_base 14: mod_base = OTHER; note = Nucleotide with phosphorothioate linkage
  modified_base 15: mod_base = OTHER; note = Nucleotide with phosphorothioate linkage
  modified_base 16: mod_base = OTHER; note = 2'-O-methoxyethyl modified nucleotide with phosphorothioate linkage
  modified_base 17: mod_base = OTHER; note = 2'-O-methoxyethyl modified thymine with phosphorothioate linkage
  modified_base 18: mod_base = OTHER; note = 2'-O-methoxyethyl modified nucleotide with phosphorothioate linkage
  modified_base 19: mod_base = OTHER; note = 2'-O-methoxyethyl 5-methylcytosine with phosphorothioate linkage
  modified_base 20: mod_base = OTHER; note = 2'-O-methoxyethyl modified nucleotide
  misc_feature 1..5: note = RNA
  misc_feature 6..15: note = DNA
  misc_feature 16..20: note = RNA
cagaggtgaagcgaagtgca

SEQ ID NO: 575 - DNA, 20 bp, synthetic construct
  source 1..20: mol_type = other DNA
  modified_base 1: mod_base = OTHER; note = 2'-O-methoxyethyl 5-methylcytosine with phosphorothioate linkage
  modified_base 2: mod_base = OTHER; note = Locked nucleic acid with phosphorothioate linkage
  modified_base 3: mod_base = OTHER; note = 2'-O-methoxyethyl modified nucleotide with phosphorothioate linkage
  modified_base 4: mod_base = OTHER; note = 2'-O-methoxyethyl modified nucleotide with phosphorothioate linkage
  modified_base 5: mod_base = OTHER; note = 2'-O-methoxyethyl modified nucleotide with phosphorothioate linkage
  modified_base 6: mod_base = OTHER; note = Nucleotide with phosphorothioate linkage
  modified_base 7: mod_base = OTHER; note = Thymine with phosphorothioate linkage
  modified_base 8: mod_base = OTHER; note = Nucleotide with phosphorothioate linkage
  modified_base 9: mod_base = OTHER; note = Nucleotide with phosphorothioate linkage
  modified_base 10: mod_base = OTHER; note = Nucleotide with phosphorothioate linkage
  modified_base 11: mod_base = OTHER; note = Nucleotide with phosphorothioate linkage
  modified_base 12: mod_base = OTHER; note = 5-methylcytosine with phosphorothioate linkage
  modified_base 13: mod_base = OTHER; note = Nucleotide with phosphorothioate linkage
  modified_base 14: mod_base = OTHER; note = Nucleotide with phosphorothioate linkage
  modified_base 15: mod_base = OTHER; note = Nucleotide with phosphorothioate linkage
  modified_base 16: mod_base = OTHER; note = Locked nucleic acid with phosphorothioate linkage
  modified_base 17: mod_base = OTHER; note = 2'-O-methoxyethyl modified thymine with phosphorothioate linkage
  modified_base 18: mod_base = OTHER; note = 2'-O-methoxyethyl modified nucleotide with phosphorothioate linkage
  modified_base 19: mod_base = OTHER; note = 2'-O-methoxyethyl 5-methylcytosine with phosphorothioate linkage
  modified_base 20: mod_base = OTHER; note = 2'-O-methoxyethyl modified nucleotide
  misc_feature 1..5: note = RNA
  misc_feature 6..15: note = DNA
  misc_feature 16..20: note = RNA
cagaggtgaagcgaagtgca

SEQ ID NO: 576 - DNA, 20 bp, synthetic construct
  source 1..20: mol_type = other DNA
  modified_base 1: mod_base = OTHER; note = 2'-O-methoxyethyl 5-methylcytosine with phosphorothioate linkage
  modified_base 2: mod_base = OTHER; note = Locked nucleic acid with phosphorothioate linkage
  modified_base 3: mod_base = OTHER; note = 2'-O-methoxyethyl modified nucleotide with phosphorothioate linkage
  modified_base 4: mod_base = OTHER; note = 2'-O-methoxyethyl modified nucleotide with phosphorothioate linkage
  modified_base 5: mod_base = OTHER; note = 2'-O-methoxyethyl modified nucleotide with phosphorothioate linkage
  modified_base 6: mod_base = OTHER; note = Nucleotide with phosphorothioate linkage
  modified_base 7: mod_base = OTHER; note = Thymine with phosphorothioate linkage
  modified_base 8: mod_base = OTHER; note = Nucleotide with phosphorothioate linkage
  modified_base 9: mod_base = OTHER; note = Nucleotide with phosphorothioate linkage
  modified_base 10: mod_base = OTHER; note = Nucleotide with phosphorothioate linkage
  modified_base 11: mod_base = OTHER; note = Nucleotide with phosphorothioate linkage
  modified_base 12: mod_base = OTHER; note = 5-methylcytosine with phosphorothioate linkage
  modified_base 13: mod_base = OTHER; note = Nucleotide with phosphorothioate linkage
  modified_base 14: mod_base = OTHER; note = Nucleotide with phosphorothioate linkage
  modified_base 15: mod_base = OTHER; note = Nucleotide with phosphorothioate linkage
  modified_base 16: mod_base = OTHER; note = 2'-O-methoxyethyl modified nucleotide with phosphorothioate linkage
  modified_base 17: mod_base = OTHER; note = Locked thymine with phosphorothioate linkage
  modified_base 18: mod_base = OTHER; note = 2'-O-methoxyethyl modified nucleotide with phosphorothioate linkage
  modified_base 19: mod_base = OTHER; note = 2'-O-methoxyethyl 5-methylcytosine with phosphorothioate linkage
  modified_base 20: mod_base = OTHER; note = 2'-O-methoxyethyl modified nucleotide
  misc_feature 1..5: note = RNA
  misc_feature 6..15: note = DNA
  misc_feature 16..20: note = RNA
cagaggtgaagcgaagtgca

SEQ ID NO: 577 - DNA, 20 bp, synthetic construct
  source 1..20: mol_type = other DNA
  modified_base 1: mod_base = OTHER; note = 2'-O-methoxyethyl 5-methylcytosine with phosphorothioate linkage
  modified_base 2: mod_base = OTHER; note = Locked nucleic acid with phosphorothioate linkage
  modified_base 3: mod_base = OTHER; note = 2'-O-methoxyethyl modified nucleotide with phosphorothioate linkage
  modified_base 4: mod_base = OTHER; note = 2'-O-methoxyethyl modified nucleotide with phosphorothioate linkage
  modified_base 5: mod_base = OTHER; note = 2'-O-methoxyethyl modified nucleotide with phosphorothioate linkage
  modified_base 6: mod_base = OTHER; note = Nucleotide with phosphorothioate linkage
  modified_base 7: mod_base = OTHER; note = Thymine with phosphorothioate linkage
  modified_base 8: mod_base = OTHER; note = Nucleotide with phosphorothioate linkage
  modified_base 9: mod_base = OTHER; note = Nucleotide with phosphorothioate linkage
  modified_base 10: mod_base = OTHER; note = Nucleotide with phosphorothioate linkage
  modified_base 11: mod_base = OTHER; note = Nucleotide with phosphorothioate linkage
  modified_base 12: mod_base = OTHER; note = 5-methylcytosine with phosphorothioate linkage
  modified_base 13: mod_base = OTHER; note = Nucleotide with phosphorothioate linkage
  modified_base 14: mod_base = OTHER; note = Nucleotide with phosphorothioate linkage
  modified_base 15: mod_base = OTHER; note = Nucleotide with phosphorothioate linkage
  modified_base 16: mod_base = OTHER; note = 2'-O-methoxyethyl modified nucleotide with phosphorothioate linkage
  modified_base 17: mod_base = OTHER; note = 2'-O-methoxyethyl modified thymine with phosphorothioate linkage
  modified_base 18: mod_base = OTHER; note = Locked nucleic acid with phosphorothioate linkage
  modified_base 19: mod_base = OTHER; note = 2'-O-methoxyethyl 5-methylcytosine with phosphorothioate linkage
  modified_base 20: mod_base = OTHER; note = 2'-O-methoxyethyl modified nucleotide
  misc_feature 1..5: note = RNA
  misc_feature 6..15: note = DNA
  misc_feature 16..20: note = RNA
cagaggtgaagcgaagtgca

SEQ ID NO: 578 - DNA, 20 bp, synthetic construct
  source 1..20: mol_type = other DNA
  modified_base 1: mod_base = OTHER; note = 2'-O-methoxyethyl 5-methylcytosine with phosphorothioate linkage
  modified_base 2: mod_base = OTHER; note = Locked nucleic acid with phosphorothioate linkage
  modified_base 3: mod_base = OTHER; note = 2'-O-methoxyethyl modified nucleotide with phosphorothioate linkage
  modified_base 4: mod_base = OTHER; note = 2'-O-methoxyethyl modified nucleotide with phosphorothioate linkage
  modified_base 5: mod_base = OTHER; note = 2'-O-methoxyethyl modified nucleotide with phosphorothioate linkage
  modified_base 6: mod_base = OTHER; note = Nucleotide with phosphorothioate linkage
  modified_base 7: mod_base = OTHER; note = Thymine with phosphorothioate linkage
  modified_base 8: mod_base = OTHER; note = Nucleotide with phosphorothioate linkage
  modified_base 9: mod_base = OTHER; note = Nucleotide with phosphorothioate linkage
  modified_base 10: mod_base = OTHER; note = Nucleotide with phosphorothioate linkage
  modified_base 11: mod_base = OTHER; note = Nucleotide with phosphorothioate linkage
  modified_base 12: mod_base = OTHER; note = 5-methylcytosine with phosphorothioate linkage
  modified_base 13: mod_base = OTHER; note = Nucleotide with phosphorothioate linkage
  modified_base 14: mod_base = OTHER; note = Nucleotide with phosphorothioate linkage
  modified_base 15: mod_base = OTHER; note = Nucleotide with phosphorothioate linkage
  modified_base 16: mod_base = OTHER; note = 2'-O-methoxyethyl modified nucleotide with phosphorothioate linkage
  modified_base 17: mod_base = OTHER; note = 2'-O-methoxyethyl modified thymine with phosphorothioate linkage
  modified_base 18: mod_base = OTHER; note = 2'-O-methoxyethyl modified nucleotide with phosphorothioate linkage
  modified_base 19: mod_base = OTHER; note = Locked 5-methylcytosine with phosphorothioate linkage
  modified_base 20: mod_base = OTHER; note = 2'-O-methoxyethyl modified nucleotide
  misc_feature 1..5: note = RNA
  misc_feature 6..15: note = DNA
  misc_feature 16..20: note = RNA
cagaggtgaagcgaagtgca

SEQ ID NO: 579 - DNA, 20 bp, synthetic construct
  source 1..20: mol_type = other DNA
  modified_base 1: mod_base = OTHER; note = 2'-O-methoxyethyl 5-methylcytosine with phosphorothioate linkage
  modified_base 2: mod_base = OTHER; note = 2'-O-methoxyethyl modified nucleotide with phosphorothioate linkage
  modified_base 3: mod_base = OTHER; note = Locked nucleic acid with phosphorothioate linkage
  modified_base 4: mod_base = OTHER; note = Locked nucleic acid with phosphorothioate linkage
  modified_base 5: mod_base = OTHER; note = 2'-O-methoxyethyl modified nucleotide with phosphorothioate linkage
  modified_base 6: mod_base = OTHER; note = Nucleotide with phosphorothioate linkage
  modified_base 7: mod_base = OTHER; note = Thymine with phosphorothioate linkage
  modified_base 8: mod_base = OTHER; note = Nucleotide with phosphorothioate linkage
  modified_base 9: mod_base = OTHER; note = Nucleotide with phosphorothioate linkage
  modified_base 10: mod_base = OTHER; note = Nucleotide with phosphorothioate linkage
  modified_base 11: mod_base = OTHER; note = Nucleotide with phosphorothioate linkage
  modified_base 12: mod_base = OTHER; note = 5-methylcytosine with phosphorothioate linkage
  modified_base 13: mod_base = OTHER; note = Nucleotide with phosphorothioate linkage
  modified_base 14: mod_base = OTHER; note = Nucleotide with phosphorothioate linkage
  modified_base 15: mod_base = OTHER; note = Nucleotide with phosphorothioate linkage
  modified_base 16: mod_base = OTHER; note = 2'-O-methoxyethyl modified nucleotide with phosphorothioate linkage
  modified_base 17: mod_base = OTHER; note = 2'-O-methoxyethyl modified thymine with phosphorothioate linkage
  modified_base 18: mod_base = OTHER; note = 2'-O-methoxyethyl modified nucleotide with phosphorothioate linkage
  modified_base 19: mod_base = OTHER; note = 2'-O-methoxyethyl 5-methylcytosine with phosphorothioate linkage
  modified_base 20: mod_base = OTHER; note = 2'-O-methoxyethyl modified nucleotide
  misc_feature 1..5: note = RNA
  misc_feature 6..15: note = DNA
  misc_feature 16..20: note = RNA
cagaggtgaagcgaagtgca

SEQ ID NO: 580 - DNA, 20 bp, synthetic construct
  source 1..20: mol_type = other DNA
  modified_base 1: mod_base = OTHER; note = 2'-O-methoxyethyl 5-methylcytosine with phosphorothioate linkage
  modified_base 2: mod_base = OTHER; note = 2'-O-methoxyethyl modified nucleotide with phosphorothioate linkage
  modified_base 3: mod_base = OTHER; note = Locked nucleic acid with phosphorothioate linkage
  modified_base 4: mod_base = OTHER; note = 2'-O-methoxyethyl modified nucleotide with phosphorothioate linkage
  modified_base 5: mod_base = OTHER; note = 2'-O-methoxyethyl modified nucleotide with phosphorothioate linkage
  modified_base 6: mod_base = OTHER; note = Nucleotide with phosphorothioate linkage
  modified_base 7: mod_base = OTHER; note = Thymine with phosphorothioate linkage
  modified_base 8: mod_base = OTHER; note = Nucleotide with phosphorothioate linkage
  modified_base 9: mod_base = OTHER; note = Nucleotide with phosphorothioate linkage
  modified_base 10: mod_base = OTHER; note = Nucleotide with phosphorothioate linkage
  modified_base 11: mod_base = OTHER; note = Nucleotide with phosphorothioate linkage
  modified_base 12: mod_base = OTHER; note = 5-methylcytosine with phosphorothioate linkage
  modified_base 13: mod_base = OTHER; note = Nucleotide with phosphorothioate linkage
  modified_base 14: mod_base = OTHER; note = Nucleotide with phosphorothioate linkage
  modified_base 15: mod_base = OTHER; note = Nucleotide with phosphorothioate linkage
  modified_base 16: mod_base = OTHER; note = 2'-O-methoxyethyl modified nucleotide with phosphorothioate linkage
  modified_base 17: mod_base = OTHER; note = Locked thymine with phosphorothioate linkage
  modified_base 18: mod_base = OTHER; note = 2'-O-methoxyethyl modified nucleotide with phosphorothioate linkage
  modified_base 19: mod_base = OTHER; note = 2'-O-methoxyethyl 5-methylcytosine with phosphorothioate linkage
  modified_base 20: mod_base = OTHER; note = 2'-O-methoxyethyl modified nucleotide
  misc_feature 1..5: note = RNA
  misc_feature 6..15: note = DNA
  misc_feature 16..20: note = RNA
cagaggtgaagcgaagtgca

SEQ ID NO: 581 - DNA, 20 bp, synthetic construct
  source 1..20: mol_type = other DNA
  modified_base 1: mod_base = OTHER; note = 2'-O-methoxyethyl 5-methylcytosine with phosphorothioate linkage
  modified_base 2: mod_base = OTHER; note = 2'-O-methoxyethyl modified nucleotide with phosphorothioate linkage
  modified_base 3: mod_base = OTHER; note = Locked nucleic acid with phosphorothioate linkage
  modified_base 4: mod_base = OTHER; note = 2'-O-methoxyethyl modified nucleotide with phosphorothioate linkage
  modified_base 5: mod_base = OTHER; note = 2'-O-methoxyethyl modified nucleotide with phosphorothioate linkage
  modified_base 6: mod_base = OTHER; note = Nucleotide with phosphorothioate linkage
  modified_base 7: mod_base = OTHER; note = Thymine with phosphorothioate linkage
  modified_base 8: mod_base = OTHER; note = Nucleotide with phosphorothioate linkage
  modified_base 9: mod_base = OTHER; note = Nucleotide with phosphorothioate linkage
  modified_base 10: mod_base = OTHER; note = Nucleotide with phosphorothioate linkage
  modified_base 11: mod_base = OTHER; note = Nucleotide with phosphorothioate linkage
  modified_base 12: mod_base = OTHER; note = 5-methylcytosine with phosphorothioate linkage
  modified_base 13: mod_base = OTHER; note = Nucleotide with phosphorothioate linkage
  modified_base 14: mod_base = OTHER; note = Nucleotide with phosphorothioate linkage
  modified_base 15: mod_base = OTHER; note = Nucleotide with phosphorothioate linkage
  modified_base 16: mod_base = OTHER; note = 2'-O-methoxyethyl modified nucleotide with phosphorothioate linkage
  modified_base 17: mod_base = OTHER; note = 2'-O-methoxyethyl modified thymine with phosphorothioate linkage
  modified_base 18: mod_base = OTHER; note = 2'-O-methoxyethyl modified nucleotide with phosphorothioate linkage
  modified_base 19: mod_base = OTHER; note = Locked 5-methylcytosine with phosphorothioate linkage
  modified_base 20: mod_base = OTHER; note = 2'-O-methoxyethyl modified nucleotide
  misc_feature 1..5: note = RNA
  misc_feature 6..15: note = DNA
  misc_feature 16..20: note = RNA
cagaggtgaagcgaagtgca

SEQ ID NO: 582 - DNA, 20 bp, synthetic construct
  source 1..20: mol_type = other DNA
  modified_base 1: mod_base = OTHER; note = 2'-O-methoxyethyl 5-methylcytosine with phosphorothioate linkage
  modified_base 2: mod_base = OTHER; note = 2'-O-methoxyethyl modified nucleotide with phosphorothioate linkage
  modified_base 3: mod_base = OTHER; note = Locked nucleic acid with phosphorothioate linkage
  modified_base 4: mod_base = OTHER; note = 2'-O-methoxyethyl modified nucleotide with phosphorothioate linkage
  modified_base 5: mod_base = OTHER; note = 2'-O-methoxyethyl modified nucleotide with phosphorothioate linkage
  modified_base 6: mod_base = OTHER; note = Nucleotide with phosphorothioate linkage
  modified_base 7: mod_base = OTHER; note = Thymine with phosphorothioate linkage
  modified_base 8: mod_base = OTHER; note = Nucleotide with phosphorothioate linkage
  modified_base 9: mod_base = OTHER; note = Nucleotide with phosphorothioate linkage
  modified_base 10: mod_base = OTHER; note = Nucleotide with phosphorothioate linkage
  modified_base 11: mod_base = OTHER; note = Nucleotide with phosphorothioate linkage
  modified_base 12: mod_base = OTHER; note = 5-methylcytosine with phosphorothioate linkage
  modified_base 13: mod_base = OTHER; note = Nucleotide with phosphorothioate linkage
  modified_base 14: mod_base = OTHER; note = Nucleotide with phosphorothioate linkage
  modified_base 15: mod_base = OTHER; note = Nucleotide with phosphorothioate linkage
  modified_base 16: mod_base = OTHER; note = 2'-O-methoxyethyl modified nucleotide with phosphorothioate linkage
  modified_base 17: mod_base = OTHER; note = 2'-O-methoxyethyl modified thymine with phosphorothioate linkage
  modified_base 18: mod_base = OTHER; note = 2'-O-methoxyethyl modified nucleotide with phosphorothioate linkage
  modified_base 19: mod_base = OTHER; note = 2'-O-methoxyethyl 5-methylcytosine with phosphorothioate linkage
  modified_base 20: mod_base = OTHER; note = Locked nucleic acid
  misc_feature 1..5: note = RNA
  misc_feature 6..15: note = DNA
  misc_feature 16..20: note = RNA
cagaggtgaagcgaagtgca

SEQ ID NO: 583 - DNA, 20 bp, synthetic construct
  source 1..20: mol_type = other DNA
  modified_base 1: mod_base = OTHER; note = 2'-O-methoxyethyl 5-methylcytosine with phosphorothioate linkage
  modified_base 2: mod_base = OTHER; note = 2'-O-methoxyethyl modified nucleotide with phosphorothioate linkage
  modified_base 3: mod_base = OTHER; note = 2'-O-methoxyethyl modified nucleotide with phosphorothioate linkage
  modified_base 4: mod_base = OTHER; note = Locked nucleic acid with phosphorothioate linkage
  modified_base 5: mod_base = OTHER; note = Locked nucleic acid with phosphorothioate linkage
  modified_base 6: mod_base = OTHER; note = Nucleotide with phosphorothioate linkage
  modified_base 7: mod_base = OTHER; note = Thymine with phosphorothioate linkage
  modified_base 8: mod_base = OTHER; note = Nucleotide with phosphorothioate linkage
  modified_base 9: mod_base = OTHER; note = Nucleotide with phosphorothioate linkage
  modified_base 10: mod_base = OTHER; note = Nucleotide with phosphorothioate linkage
  modified_base 11: mod_base = OTHER; note = Nucleotide with phosphorothioate linkage
  modified_base 12: mod_base = OTHER; note = 5-methylcytosine with phosphorothioate linkage
  modified_base 13: mod_base = OTHER; note = Nucleotide with phosphorothioate linkage
  modified_base 14: mod_base = OTHER; note = Nucleotide with phosphorothioate linkage
  modified_base 15: mod_base = OTHER; note = Nucleotide with phosphorothioate linkage
  modified_base 16: mod_base = OTHER; note = 2'-O-methoxyethyl modified nucleotide with phosphorothioate linkage
  modified_base 17: mod_base = OTHER; note = 2'-O-methoxyethyl modified thymine with phosphorothioate linkage
  modified_base 18: mod_base = OTHER; note = 2'-O-methoxyethyl modified nucleotide with phosphorothioate linkage
  modified_base 19: mod_base = OTHER; note = 2'-O-methoxyethyl 5-methylcytosine with phosphorothioate linkage
  modified_base 20: mod_base = OTHER; note = 2'-O-methoxyethyl modified nucleotide
  misc_feature 1..5: note = RNA
  misc_feature 6..15: note = DNA
  misc_feature 16..20: note = RNA
cagaggtgaagcgaagtgca

SEQ ID NO: 584 - DNA, 20 bp, synthetic construct
  source 1..20: mol_type = other DNA
  modified_base 1: mod_base = OTHER; note = 2'-O-methoxyethyl 5-methylcytosine with phosphorothioate linkage
  modified_base 2: mod_base = OTHER; note = 2'-O-methoxyethyl modified nucleotide with phosphorothioate linkage
  modified_base 3: mod_base = OTHER; note = 2'-O-methoxyethyl modified nucleotide with phosphorothioate linkage
  modified_base 4: mod_base = OTHER; note = Locked nucleic acid with phosphorothioate linkage
  modified_base 5: mod_base = OTHER; note = 2'-O-methoxyethyl modified nucleotide with phosphorothioate linkage
  modified_base 6: mod_base = OTHER; note = Nucleotide with phosphorothioate linkage
  modified_base 7: mod_base = OTHER; note = Thymine with phosphorothioate linkage
  modified_base 8: mod_base = OTHER; note = Nucleotide with phosphorothioate linkage
  modified_base 9: mod_base = OTHER; note = Nucleotide with phosphorothioate linkage
  modified_base 10: mod_base = OTHER; note = Nucleotide with phosphorothioate linkage
  modified_base 11: mod_base = OTHER; note = Nucleotide with phosphorothioate linkage
  modified_base 12: mod_base = OTHER; note = 5-methylcytosine with phosphorothioate linkage
  modified_base 13: mod_base = OTHER; note = Nucleotide with phosphorothioate linkage
  modified_base 14: mod_base = OTHER; note = Nucleotide with phosphorothioate linkage
  modified_base 15: mod_base = OTHER; note = Nucleotide with phosphorothioate linkage
  modified_base 16: mod_base = OTHER; note = Locked nucleic acid with phosphorothioate linkage
  modified_base 17: mod_base = OTHER; note = 2'-O-methoxyethyl modified thymine with phosphorothioate linkage
  modified_base 18: mod_base = OTHER; note = 2'-O-methoxyethyl modified nucleotide with phosphorothioate linkage
  modified_base 19: mod_base = OTHER; note = 2'-O-methoxyethyl 5-methylcytosine with phosphorothioate linkage
  modified_base 20: mod_base = OTHER; note = 2'-O-methoxyethyl modified nucleotide
  misc_feature 1..5: note = RNA
  misc_feature 6..15: note = DNA
  misc_feature 16..20: note = RNA
cagaggtgaagcgaagtgca

SEQ ID NO: 585 - DNA, 20 bp, synthetic construct
  source 1..20: mol_type = other DNA
  modified_base 1: mod_base = OTHER; note = 2'-O-methoxyethyl 5-methylcytosine with phosphorothioate linkage
  modified_base 2: mod_base = OTHER; note = 2'-O-methoxyethyl modified nucleotide with phosphorothioate linkage
  modified_base 3: mod_base = OTHER; note = 2'-O-methoxyethyl modified nucleotide with phosphorothioate linkage
  modified_base 4: mod_base = OTHER; note = Locked nucleic acid with phosphorothioate linkage
  modified_base 5: mod_base = OTHER; note = 2'-O-methoxyethyl modified nucleotide with phosphorothioate linkage
  modified_base 6: mod_base = OTHER; note = Nucleotide with phosphorothioate linkage
  modified_base 7: mod_base = OTHER; note = Thymine with phosphorothioate linkage
  modified_base 8: mod_base = OTHER; note = Nucleotide with phosphorothioate linkage
  modified_base 9: mod_base = OTHER; note = Nucleotide with phosphorothioate linkage
  modified_base 10: mod_base = OTHER; note = Nucleotide with phosphorothioate linkage
  modified_base 11: mod_base = OTHER; note = Nucleotide with phosphorothioate linkage
  modified_base 12: mod_base = OTHER; note = 5-methylcytosine with phosphorothioate linkage
  modified_base 13: mod_base = OTHER; note = Nucleotide with phosphorothioate linkage
  modified_base 14: mod_base = OTHER; note = Nucleotide with phosphorothioate linkage
  modified_base 15: mod_base = OTHER; note = Nucleotide with phosphorothioate linkage
  modified_base 16: mod_base = OTHER; note = 2'-O-methoxyethyl modified nucleotide with phosphorothioate linkage
  modified_base 17: mod_base = OTHER; note = Locked thymine with phosphorothioate linkage
  modified_base 18: mod_base = OTHER; note = 2'-O-methoxyethyl modified nucleotide with phosphorothioate linkage
  modified_base 19: mod_base = OTHER; note = 2'-O-methoxyethyl 5-methylcytosine with phosphorothioate linkage
  modified_base 20: mod_base = OTHER; note = 2'-O-methoxyethyl modified nucleotide
  misc_feature 1..5: note = RNA
  misc_feature 6..15: note = DNA
  misc_feature 16..20: note = RNA
cagaggtgaagcgaagtgca

SEQ ID NO: 586 - DNA, 20 bp, synthetic construct
  source 1..20: mol_type = other DNA
  modified_base 1: mod_base = OTHER; note = 2'-O-methoxyethyl 5-methylcytosine with phosphorothioate linkage
  modified_base 2: mod_base = OTHER; note = 2'-O-methoxyethyl modified nucleotide with phosphorothioate linkage
  modified_base 3: mod_base = OTHER; note = 2'-O-methoxyethyl modified nucleotide with phosphorothioate linkage
  modified_base 4: mod_base = OTHER; note = Locked nucleic acid with phosphorothioate linkage
  modified_base 5: mod_base = OTHER; note = 2'-O-methoxyethyl modified nucleotide with phosphorothioate linkage
  modified_base 6: mod_base = OTHER; note = Nucleotide with phosphorothioate linkage
  modified_base 7: mod_base = OTHER; note = Thymine with phosphorothioate linkage
  modified_base 8: mod_base = OTHER; note = Nucleotide with phosphorothioate linkage
  modified_base 9: mod_base = OTHER; note = Nucleotide with phosphorothioate linkage
  modified_base 10: mod_base = OTHER; note = Nucleotide with phosphorothioate linkage
  modified_base 11: mod_base = OTHER; note = Nucleotide with phosphorothioate linkage
  modified_base 12: mod_base = OTHER; note = 5-methylcytosine with phosphorothioate linkage
  modified_base 13: mod_base = OTHER; note = Nucleotide with phosphorothioate linkage
  modified_base 14: mod_base = OTHER; note = Nucleotide with phosphorothioate linkage
  modified_base 15: mod_base = OTHER; note = Nucleotide with phosphorothioate linkage
  modified_base 16: mod_base = OTHER; note = 2'-O-methoxyethyl modified nucleotide with phosphorothioate linkage
  modified_base 17: mod_base = OTHER; note = 2'-O-methoxyethyl modified thymine with phosphorothioate linkage
  modified_base 18: mod_base = OTHER; note = Locked nucleic acid with phosphorothioate linkage
  modified_base 19: mod_base = OTHER; note = 2'-O-methoxyethyl 5-methylcytosine with phosphorothioate linkage
  modified_base 20: mod_base = OTHER; note = 2'-O-methoxyethyl modified nucleotide
  misc_feature 1..5: note = RNA
  misc_feature 6..15: note = DNA
  misc_feature 16..20: note = RNA
cagaggtgaagcgaagtgca

SEQ ID NO: 587 - DNA, 20 bp, synthetic construct
  source 1..20: mol_type = other DNA
  modified_base 1: mod_base = OTHER; note = 2'-O-methoxyethyl 5-methylcytosine with phosphorothioate linkage
  modified_base 2: mod_base = OTHER; note = 2'-O-methoxyethyl modified nucleotide with phosphorothioate linkage
  modified_base 3: mod_base = OTHER; note = 2'-O-methoxyethyl modified nucleotide with phosphorothioate linkage
  modified_base 4: mod_base = OTHER; note = Locked nucleic acid with phosphorothioate linkage
  modified_base 5: mod_base = OTHER; note = 2'-O-methoxyethyl modified nucleotide with phosphorothioate linkage
  modified_base 6: mod_base = OTHER; note = Nucleotide with phosphorothioate linkage
  modified_base 7: mod_base = OTHER; note = Thymine with phosphorothioate linkage
  modified_base 8: mod_base = OTHER; note = Nucleotide with phosphorothioate linkage
  modified_base 9: mod_base = OTHER; note = Nucleotide with phosphorothioate linkage
  modified_base 10: mod_base = OTHER; note = Nucleotide with phosphorothioate linkage
  modified_base 11: mod_base = OTHER; note = Nucleotide with phosphorothioate linkage
  modified_base 12: mod_base = OTHER; note = 5-methylcytosine with phosphorothioate linkage
  modified_base 13: mod_base = OTHER; note = Nucleotide with phosphorothioate linkage
  modified_base 14: mod_base = OTHER; note = Nucleotide with phosphorothioate linkage
  modified_base 15: mod_base = OTHER; note = Nucleotide with phosphorothioate linkage
  modified_base 16: mod_base = OTHER; note = 2'-O-methoxyethyl modified nucleotide with phosphorothioate linkage
  modified_base 17: mod_base = OTHER; note = 2'-O-methoxyethyl modified thymine with phosphorothioate linkage
  modified_base 18: mod_base = OTHER; note = 2'-O-methoxyethyl modified nucleotide with phosphorothioate linkage
  modified_base 19: mod_base = OTHER; note = Locked 5-methylcytosine with phosphorothioate linkage
  modified_base 20: mod_base = OTHER; note = 2'-O-methoxyethyl modified nucleotide
  misc_feature 1..5: note = RNA
  misc_feature 6..15: note = DNA
  misc_feature 16..20: note = RNA
cagaggtgaagcgaagtgca

SEQ ID NO: 588 - DNA, 20 bp, synthetic construct
  source 1..20: mol_type = other DNA
  modified_base 1: mod_base = OTHER; note = 2'-O-methoxyethyl 5-methylcytosine with phosphorothioate linkage
  modified_base 2: mod_base = OTHER; note = 2'-O-methoxyethyl modified nucleotide with phosphorothioate linkage
  modified_base 3: mod_base = OTHER; note = 2'-O-methoxyethyl modified nucleotide with phosphorothioate linkage
  modified_base 4: mod_base = OTHER; note = 2'-O-methoxyethyl modified nucleotide with phosphorothioate linkage
  modified_base 5: mod_base = OTHER; note = Locked nucleic acid with phosphorothioate linkage
  modified_base 6: mod_base = OTHER; note = Nucleotide with phosphorothioate linkage
  modified_base 7: mod_base = OTHER; note = Thymine with phosphorothioate linkage
  modified_base 8: mod_base = OTHER; note = Nucleotide with phosphorothioate linkage
  modified_base 9: mod_base = OTHER; note = Nucleotide with phosphorothioate linkage
  modified_base 10: mod_base = OTHER; note = Nucleotide with phosphorothioate linkage
  modified_base 11: mod_base = OTHER; note = Nucleotide with phosphorothioate linkage
  modified_base 12: mod_base = OTHER; note = 5-methylcytosine with phosphorothioate linkage
  modified_base 13: mod_base = OTHER; note = Nucleotide with phosphorothioate linkage
  modified_base 14: mod_base = OTHER; note = Nucleotide with phosphorothioate linkage
  modified_base 15: mod_base = OTHER; note = Nucleotide with phosphorothioate linkage
  modified_base 16: mod_base = OTHER; note = 2'-O-methoxyethyl modified nucleotide with phosphorothioate linkage
  modified_base 17: mod_base = OTHER; note = Locked thymine with phosphorothioate linkage
  modified_base 18: mod_base = OTHER; note = 2'-O-methoxyethyl modified nucleotide with phosphorothioate linkage
  modified_base 19: mod_base = OTHER; note = 2'-O-methoxyethyl 5-methylcytosine with phosphorothioate linkage
  modified_base 20: mod_base = OTHER; note = 2'-O-methoxyethyl modified nucleotide
  misc_feature 1..5: note = RNA
  misc_feature 6..15: note = DNA
  misc_feature 16..20: note = RNA
cagaggtgaagcgaagtgca

SEQ ID NO: 589 - DNA, 20 bp, synthetic construct
  source 1..20: mol_type = other DNA
  modified_base 1: mod_base = OTHER; note = 2'-O-methoxyethyl 5-methylcytosine with phosphorothioate linkage
  modified_base 2: mod_base = OTHER; note = 2'-O-methoxyethyl modified nucleotide with phosphorothioate linkage
  modified_base 3: mod_base = OTHER; note = 2'-O-methoxyethyl modified nucleotide with phosphorothioate linkage
  modified_base 4: mod_base = OTHER; note = 2'-O-methoxyethyl modified nucleotide with phosphorothioate linkage
  modified_base 5: mod_base = OTHER; note = Locked nucleic acid with phosphorothioate linkage
  modified_base 6: mod_base = OTHER; note = Nucleotide with phosphorothioate linkage
  modified_base 7: mod_base = OTHER; note = Thymine with phosphorothioate linkage
  modified_base 8: mod_base = OTHER; note = Nucleotide with phosphorothioate linkage
  modified_base 9: mod_base = OTHER; note = Nucleotide with phosphorothioate linkage
  modified_base 10: mod_base = OTHER; note = Nucleotide with phosphorothioate linkage
  modified_base 11: mod_base = OTHER; note = Nucleotide with phosphorothioate linkage
  modified_base 12: mod_base = OTHER; note = 5-methylcytosine with phosphorothioate linkage
  modified_base 13: mod_base = OTHER; note = Nucleotide with phosphorothioate linkage
  modified_base 14: mod_base = OTHER; note = Nucleotide with phosphorothioate linkage
  modified_base 15: mod_base = OTHER; note = Nucleotide with phosphorothioate linkage
  modified_base 16: mod_base = OTHER; note = 2'-O-methoxyethyl modified nucleotide with phosphorothioate linkage
  modified_base 17: mod_base = OTHER; note = 2'-O-methoxyethyl modified thymine with phosphorothioate linkage
  modified_base 18: mod_base = OTHER; note = 2'-O-methoxyethyl modified nucleotide with phosphorothioate linkage
  modified_base 19: mod_base = OTHER; note = Locked 5-methylcytosine with phosphorothioate linkage
  modified_base 20: mod_base = OTHER; note = 2'-O-methoxyethyl modified nucleotide
  misc_feature 1..5: note = RNA
  misc_feature 6..15: note = DNA
  misc_feature 16..20: note = RNA
cagaggtgaagcgaagtgca

SEQ ID NO: 590 - DNA, 20 bp, synthetic construct
  source 1..20: mol_type = other DNA
  modified_base 1: mod_base = OTHER; note = 2'-O-methoxyethyl 5-methylcytosine with phosphorothioate linkage
  modified_base 2: mod_base = OTHER; note = 2'-O-methoxyethyl modified nucleotide with phosphorothioate linkage
  modified_base 3: mod_base = OTHER; note = 2'-O-methoxyethyl modified nucleotide with phosphorothioate linkage
  modified_base 4: mod_base = OTHER; note = 2'-O-methoxyethyl modified nucleotide with phosphorothioate linkage
  modified_base 5: mod_base = OTHER; note = Locked nucleic acid with phosphorothioate linkage
  modified_base 6: mod_base = OTHER; note = Nucleotide with phosphorothioate linkage
  modified_base 7: mod_base = OTHER; note = Thymine with phosphorothioate linkage
  modified_base 8: mod_base = OTHER; note = Nucleotide with phosphorothioate linkage
  modified_base 9: mod_base = OTHER; note = Nucleotide with phosphorothioate linkage
  modified_base 10: mod_base = OTHER; note = Nucleotide with phosphorothioate linkage
  modified_base 11: mod_base = OTHER; note = Nucleotide with phosphorothioate linkage
  modified_base 12: mod_base = OTHER; note = 5-methylcytosine with phosphorothioate linkage
  modified_base 13: mod_base = OTHER; note = Nucleotide with phosphorothioate linkage
  modified_base 14: mod_base = OTHER; note = Nucleotide with phosphorothioate linkage
  modified_base 15: mod_base = OTHER; note = Nucleotide with phosphorothioate linkage
  modified_base 16: mod_base = OTHER; note = 2'-O-methoxyethyl modified nucleotide with phosphorothioate linkage
  modified_base 17: mod_base = OTHER; note = 2'-O-methoxyethyl modified thymine with phosphorothioate linkage
  modified_base 18: mod_base = OTHER; note = 2'-O-methoxyethyl modified nucleotide with phosphorothioate linkage
  modified_base 19: mod_base = OTHER; note = 2'-O-methoxyethyl 5-methylcytosine with phosphorothioate linkage
  modified_base 20: mod_base = OTHER; note = Locked nucleic acid
  misc_feature 1..5: note = RNA
  misc_feature 6..15: note = DNA
  misc_feature 16..20: note = RNA
cagaggtgaagcgaagtgca

SEQ ID NO: 591 - DNA, 20 bp, synthetic construct
  source 1..20: mol_type = other DNA
  modified_base 1: mod_base = OTHER; note = 2'-O-methoxyethyl 5-methylcytosine with phosphorothioate linkage
  modified_base 2: mod_base = OTHER; note = 2'-O-methoxyethyl modified nucleotide with phosphorothioate linkage
  modified_base 3: mod_base = OTHER; note = 2'-O-methoxyethyl modified nucleotide with phosphorothioate linkage
  modified_base 4: mod_base = OTHER; note = 2'-O-methoxyethyl modified nucleotide with phosphorothioate linkage
  modified_base 5: mod_base = OTHER; note = 2'-O-methoxyethyl modified nucleotide with phosphorothioate linkage
  modified_base 6: mod_base = OTHER; note = Nucleotide with phosphorothioate linkage
  modified_base 7: mod_base = OTHER; note = Thymine with phosphorothioate linkage
  modified_base 8: mod_base = OTHER; note = Nucleotide with phosphorothioate linkage
  modified_base 9: mod_base = OTHER; note = Nucleotide with phosphorothioate linkage
  modified_base 10: mod_base = OTHER; note = Nucleotide with phosphorothioate linkage
  modified_base 11: mod_base = OTHER; note = Nucleotide with phosphorothioate linkage
  modified_base 12: mod_base = OTHER; note = 5-methylcytosine with phosphorothioate linkage
  modified_base 13: mod_base = OTHER; note = Nucleotide with phosphorothioate linkage
  modified_base 14: mod_base = OTHER; note = Nucleotide with phosphorothioate linkage
  modified_base 15: mod_base = OTHER; note = Nucleotide with phosphorothioate linkage
  modified_base 16: mod_base = OTHER; note = Locked nucleic acid with phosphorothioate linkage
  modified_base 17: mod_base = OTHER; note = Locked thymine with phosphorothioate linkage
  modified_base 18: mod_base = OTHER; note = 2'-O-methoxyethyl modified nucleotide with phosphorothioate linkage
  modified_base 19: mod_base = OTHER; note = 2'-O-methoxyethyl 5-methylcytosine with phosphorothioate linkage
  modified_base 20: mod_base = OTHER; note = 2'-O-methoxyethyl modified nucleotide
  misc_feature 1..5: note = RNA
  misc_feature 6..15: note = DNA
  misc_feature 16..20: note = RNA
cagaggtgaagcgaagtgca

SEQ ID NO: 592 - DNA, 20 bp, synthetic construct
  source 1..20: mol_type = other DNA
  modified_base 1: mod_base = OTHER; note = 2'-O-methoxyethyl 5-methylcytosine with phosphorothioate linkage
  modified_base 2: mod_base = OTHER; note = 2'-O-methoxyethyl modified nucleotide with phosphorothioate linkage
  modified_base 3: mod_base = OTHER; note = 2'-O-methoxyethyl modified nucleotide with phosphorothioate linkage
  modified_base 4: mod_base = OTHER; note = 2'-O-methoxyethyl modified nucleotide with phosphorothioate linkage
  modified_base 5: mod_base = OTHER; note = 2'-O-methoxyethyl modified nucleotide with phosphorothioate linkage
  modified_base 6: mod_base = OTHER; note = Nucleotide with phosphorothioate linkage
  modified_base 7: mod_base = OTHER; note = Thymine with phosphorothioate linkage
  modified_base 8: mod_base = OTHER; note = Nucleotide with phosphorothioate linkage
  modified_base 9: mod_base = OTHER; note = Nucleotide with phosphorothioate linkage
  modified_base 10: mod_base = OTHER; note = Nucleotide with phosphorothioate linkage
  modified_base 11: mod_base = OTHER; note = Nucleotide with phosphorothioate linkage
  modified_base 12: mod_base = OTHER; note = 5-methylcytosine with phosphorothioate linkage
  modified_base 13: mod_base = OTHER; note = Nucleotide with phosphorothioate linkage
  modified_base 14: mod_base = OTHER; note = Nucleotide with phosphorothioate linkage
  modified_base 15: mod_base = OTHER; note = Nucleotide with phosphorothioate linkage
  modified_base 16: mod_base = OTHER; note = Locked nucleic acid with phosphorothioate linkage
  modified_base 17: mod_base = OTHER; note = 2'-O-methoxyethyl modified thymine with phosphorothioate linkage
  modified_base 18: mod_base = OTHER; note = 2'-O-methoxyethyl modified nucleotide with phosphorothioate linkage
  modified_base 19: mod_base = OTHER; note = Locked 5-methylcytosine with phosphorothioate linkage
  modified_base 20: mod_base = OTHER; note = 2'-O-methoxyethyl modified nucleotide
  misc_feature 1..5: note = RNA
  misc_feature 6..15: note = DNA
  misc_feature 16..20: note = RNA
cagaggtgaagcgaagtgca

SEQ ID NO: 593 - DNA, 20 bp, synthetic construct
  source 1..20: mol_type = other DNA
  modified_base 1: mod_base = OTHER; note = 2'-O-methoxyethyl 5-methylcytosine with phosphorothioate linkage
  modified_base 2: mod_base = OTHER; note = 2'-O-methoxyethyl modified nucleotide with phosphorothioate linkage
  modified_base 3: mod_base = OTHER; note = 2'-O-methoxyethyl modified nucleotide with phosphorothioate linkage
  modified_base 4: mod_base = OTHER; note = 2'-O-methoxyethyl modified nucleotide with phosphorothioate linkage
  modified_base 5: mod_base = OTHER; note = 2'-O-methoxyethyl modified nucleotide with phosphorothioate linkage
  modified_base 6: mod_base = OTHER; note = Nucleotide with phosphorothioate linkage
  modified_base 7: mod_base = OTHER; note = Thymine with phosphorothioate linkage
  modified_base 8: mod_base = OTHER; note = Nucleotide with phosphorothioate linkage
  modified_base 9: mod_base = OTHER; note = Nucleotide with phosphorothioate linkage
  modified_base 10: mod_base = OTHER; note = Nucleotide with phosphorothioate linkage
  modified_base 11: mod_base = OTHER; note = Nucleotide with phosphorothioate linkage
  modified_base 12: mod_base = OTHER; note = 5-methylcytosine with phosphorothioate linkage
  modified_base 13: mod_base = OTHER; note = Nucleotide with phosphorothioate linkage
  modified_base 14: mod_base = OTHER; note = Nucleotide with phosphorothioate linkage
  modified_base 15: mod_base = OTHER; note = Nucleotide with phosphorothioate linkage
  modified_base 16: mod_base = OTHER; note = Locked nucleic acid with phosphorothioate linkage
  modified_base 17: mod_base = OTHER; note = 2'-O-methoxyethyl modified thymine with phosphorothioate linkage
  modified_base 18: mod_base = OTHER; note = 2'-O-methoxyethyl modified nucleotide with phosphorothioate linkage
  modified_base 19: mod_base = OTHER; note = 2'-O-methoxyethyl 5-methylcytosine with phosphorothioate linkage
  modified_base 20: mod_base = OTHER; note = Locked nucleic acid
  misc_feature 1..5: note = RNA
  misc_feature 6..15: note = DNA
  misc_feature 16..20: note = RNA
cagaggtgaagcgaagtgca

SEQ ID NO: 594 - DNA, 20 bp, synthetic construct
  source 1..20: mol_type = other DNA
  modified_base 1: mod_base = OTHER; note = 2'-O-methoxyethyl 5-methylcytosine with phosphorothioate linkage
  modified_base 2: mod_base = OTHER; note = 2'-O-methoxyethyl modified nucleotide with phosphorothioate linkage
  modified_base 3: mod_base = OTHER; note = 2'-O-methoxyethyl modified nucleotide with phosphorothioate linkage
  modified_base 4: mod_base = OTHER; note = 2'-O-methoxyethyl modified nucleotide with phosphorothioate linkage
  modified_base 5: mod_base = OTHER; note = 2'-O-methoxyethyl modified nucleotide with phosphorothioate linkage
  modified_base 6: mod_base = OTHER; note = Nucleotide with phosphorothioate linkage
  modified_base 7: mod_base = OTHER; note = Thymine with phosphorothioate linkage
  modified_base 8: mod_base = OTHER; note = Nucleotide with phosphorothioate linkage
  modified_base 9: mod_base = OTHER; note = Nucleotide with phosphorothioate linkage
  modified_base 10: mod_base = OTHER; note = Nucleotide with phosphorothioate linkage
  modified_base 11: mod_base = OTHER; note = Nucleotide with phosphorothioate linkage
  modified_base 12: mod_base = OTHER; note = 5-methylcytosine with phosphorothioate linkage
  modified_base 13: mod_base = OTHER; note = Nucleotide with phosphorothioate linkage
  modified_base 14: mod_base = OTHER; note = Nucleotide with phosphorothioate linkage
  modified_base 15: mod_base = OTHER; note = Nucleotide with phosphorothioate linkage
  modified_base 16: mod_base = OTHER; note = 2'-O-methoxyethyl modified nucleotide with phosphorothioate linkage
  modified_base 17: mod_base = OTHER; note = Locked thymine with phosphorothioate linkage
  modified_base 18: mod_base = OTHER; note = Locked nucleic acid with phosphorothioate linkage
  modified_base 19: mod_base = OTHER; note = 2'-O-methoxyethyl 5-methylcytosine with phosphorothioate linkage
  modified_base 20: mod_base = OTHER; note = 2'-O-methoxyethyl modified nucleotide
  misc_feature 1..5: note = RNA
  misc_feature 6..15: note = DNA
  misc_feature 16..20: note = RNA
cagaggtgaagcgaagtgca

SEQ ID NO: 595 - DNA, 20 bp, synthetic construct
  source 1..20: mol_type = other DNA
  modified_base 1: mod_base = OTHER; note = 2'-O-methoxyethyl 5-methylcytosine with phosphorothioate linkage
  modified_base 2: mod_base = OTHER; note = 2'-O-methoxyethyl modified nucleotide with phosphorothioate linkage
  modified_base 3: mod_base = OTHER; note = 2'-O-methoxyethyl modified nucleotide with phosphorothioate linkage
  modified_base 4: mod_base = OTHER; note = 2'-O-methoxyethyl modified nucleotide with phosphorothioate linkage
  modified_base 5: mod_base = OTHER; note = 2'-O-methoxyethyl modified nucleotide with phosphorothioate linkage
  modified_base 6: mod_base = OTHER; note = Nucleotide with phosphorothioate linkage
  modified_base 7: mod_base = OTHER; note = Thymine with phosphorothioate linkage
  modified_base 8: mod_base = OTHER; note = Nucleotide with phosphorothioate linkage
  modified_base 9: mod_base = OTHER; note = Nucleotide with phosphorothioate linkage
  modified_base 10: mod_base = OTHER; note = Nucleotide with phosphorothioate linkage
  modified_base 11: mod_base = OTHER; note = Nucleotide with phosphorothioate linkage
  modified_base 12: mod_base = OTHER; note = 5-methylcytosine with phosphorothioate linkage
  modified_base 13: mod_base = OTHER; note = Nucleotide with phosphorothioate linkage
  modified_base 14: mod_base = OTHER; note = Nucleotide with phosphorothioate linkage
  modified_base 15: mod_base = OTHER; note = Nucleotide with phosphorothioate linkage
  modified_base 16: mod_base = OTHER; note = 2'-O-methoxyethyl modified nucleotide with phosphorothioate linkage
  modified_base 17: mod_base = OTHER; note = Locked thymine with phosphorothioate linkage
  modified_base 18: mod_base = OTHER; note = 2'-O-methoxyethyl modified nucleotide with phosphorothioate linkage
  modified_base 19: mod_base = OTHER; note = Locked 5-methylcytosine with phosphorothioate linkage
  modified_base 20: mod_base = OTHER; note = 2'-O-methoxyethyl modified nucleotide
  misc_feature 1..5: note = RNA
  misc_feature 6..15: note = DNA
  misc_feature 16..20: note = RNA
cagaggtgaagcgaagtgca

SEQ ID NO: 596 - DNA, 20 bp, synthetic construct
  source 1..20: mol_type = other DNA
  modified_base 1: mod_base = OTHER; note = 2'-O-methoxyethyl 5-methylcytosine with phosphorothioate linkage
  modified_base 2: mod_base = OTHER; note = 2'-O-methoxyethyl modified nucleotide with phosphorothioate linkage
  modified_base 3: mod_base = OTHER; note = 2'-O-methoxyethyl modified nucleotide with phosphorothioate linkage
  modified_base 4: mod_base = OTHER; note = 2'-O-methoxyethyl modified nucleotide with phosphorothioate linkage
  modified_base 5: mod_base = OTHER; note = 2'-O-methoxyethyl modified nucleotide with phosphorothioate linkage
  modified_base 6: mod_base = OTHER; note = Nucleotide with phosphorothioate linkage
  modified_base 7: mod_base = OTHER; note = Thymine with phosphorothioate linkage
  modified_base 8: mod_base = OTHER; note = Nucleotide with phosphorothioate linkage
  modified_base 9: mod_base = OTHER; note = Nucleotide with phosphorothioate linkage
  modified_base 10: mod_base = OTHER; note = Nucleotide with phosphorothioate linkage
  modified_base 11: mod_base = OTHER; note = Nucleotide with phosphorothioate linkage
  modified_base 12: mod_base = OTHER; note = 5-methylcytosine with phosphorothioate linkage
  modified_base 13: mod_base = OTHER; note = Nucleotide with phosphorothioate linkage
  modified_base 14: mod_base = OTHER; note = Nucleotide with phosphorothioate linkage
  modified_base 15: mod_base = OTHER; note = Nucleotide with phosphorothioate linkage
  modified_base 16: mod_base = OTHER; note = 2'-O-methoxyethyl modified nucleotide with phosphorothioate linkage
  modified_base 17: mod_base = OTHER; note = Locked thymine with phosphorothioate linkage
  modified_base 18: mod_base = OTHER; note = 2'-O-methoxyethyl modified nucleotide with phosphorothioate linkage
  modified_base 19: mod_base = OTHER; note = 2'-O-methoxyethyl 5-methylcytosine with phosphorothioate linkage
  modified_base 20: mod_base = OTHER; note = Locked nucleic acid
  misc_feature 1..5: note = RNA
  misc_feature 6..15: note = DNA
  misc_feature 16..20: note = RNA
cagaggtgaagcgaagtgca

SEQ ID NO: 597 - DNA, 20 bp, synthetic construct
  source 1..20: mol_type = other DNA
  modified_base 1: mod_base = OTHER; note = 2'-O-methoxyethyl 5-methylcytosine with phosphorothioate linkage
  modified_base 2: mod_base = OTHER; note = 2'-O-methoxyethyl modified nucleotide with phosphorothioate linkage
  modified_base 3: mod_base = OTHER; note = 2'-O-methoxyethyl modified nucleotide with phosphorothioate linkage
  modified_base 4: mod_base = OTHER; note = 2'-O-methoxyethyl modified nucleotide with phosphorothioate linkage
  modified_base 5: mod_base = OTHER; note = 2'-O-methoxyethyl modified nucleotide with phosphorothioate linkage
  modified_base 6: mod_base = OTHER; note = Nucleotide with phosphorothioate linkage
  modified_base 7: mod_base = OTHER; note = Thymine with phosphorothioate linkage
  modified_base 8: mod_base = OTHER; note = Nucleotide with phosphorothioate linkage
  modified_base 9: mod_base = OTHER; note = Nucleotide with phosphorothioate linkage
  modified_base 10: mod_base = OTHER; note = Nucleotide with phosphorothioate linkage
  modified_base 11: mod_base = OTHER; note = Nucleotide with phosphorothioate linkage
  modified_base 12: mod_base = OTHER; note = 5-methylcytosine with phosphorothioate linkage
  modified_base 13: mod_base = OTHER; note = Nucleotide with phosphorothioate linkage
  modified_base 14: mod_base = OTHER; note = Nucleotide with phosphorothioate linkage
  modified_base 15: mod_base = OTHER; note = Nucleotide with phosphorothioate linkage
  modified_base 16: mod_base = OTHER; note = 2'-O-methoxyethyl modified nucleotide with phosphorothioate linkage
  modified_base 17: mod_base = OTHER; note = 2'-O-methoxyethyl modified thymine with phosphorothioate linkage
  modified_base 18: mod_base = OTHER; note = Locked nucleic acid with phosphorothioate linkage
  modified_base 19: mod_base = OTHER; note = Locked 5-methylcytosine with phosphorothioate linkage
  modified_base 20: mod_base = OTHER; note = 2'-O-methoxyethyl modified nucleotide
  misc_feature 1..5: note = RNA
  misc_feature 6..15: note = DNA
  misc_feature 16..20: note = RNA
cagaggtgaagcgaagtgca

SEQ ID NO: 598 - DNA, 20 bp, synthetic construct
  source 1..20: mol_type = other DNA
  modified_base 1: mod_base = OTHER; note = 2'-O-methoxyethyl 5-methylcytosine with phosphorothioate linkage
  modified_base 2: mod_base = OTHER; note = 2'-O-methoxyethyl modified nucleotide with phosphorothioate linkage
  modified_base 3: mod_base = OTHER; note = 2'-O-methoxyethyl modified nucleotide with phosphorothioate linkage
  modified_base 4: mod_base = OTHER; note = 2'-O-methoxyethyl modified nucleotide with phosphorothioate linkage
  modified_base 5: mod_base = OTHER; note = 2'-O-methoxyethyl modified nucleotide with phosphorothioate linkage
  modified_base 6: mod_base = OTHER; note = Nucleotide with phosphorothioate linkage
  modified_base 7: mod_base = OTHER; note = Thymine with phosphorothioate linkage
  modified_base 8: mod_base = OTHER; note = Nucleotide with phosphorothioate linkage
  modified_base 9: mod_base = OTHER; note = Nucleotide with phosphorothioate linkage
  modified_base 10: mod_base = OTHER; note = Nucleotide with phosphorothioate linkage
  modified_base 11: mod_base = OTHER; note = Nucleotide with phosphorothioate linkage
  modified_base 12: mod_base = OTHER; note = 5-methylcytosine with phosphorothioate linkage
  modified_base 13: mod_base = OTHER; note = Nucleotide with phosphorothioate linkage
  modified_base 14: mod_base = OTHER; note = Nucleotide with phosphorothioate linkage
  modified_base 15: mod_base = OTHER; note = Nucleotide with phosphorothioate linkage
  modified_base 16: mod_base = OTHER; note = 2'-O-methoxyethyl modified nucleotide with phosphorothioate linkage
  modified_base 17: mod_base = OTHER; note = 2'-O-methoxyethyl modified thymine with phosphorothioate linkage
  modified_base 18: mod_base = OTHER; note = Locked nucleic acid with phosphorothioate linkage
  modified_base 19: mod_base = OTHER; note = 2'-O-methoxyethyl 5-methylcytosine with phosphorothioate linkage
  modified_base 20: mod_base = OTHER; note = Locked nucleic acid
  misc_feature 1..5: note = RNA
  misc_feature 6..15: note = DNA
  misc_feature 16..20: note = RNA
cagaggtgaagcgaagtgca

SEQ ID NO: 599 - DNA, 20 bp, synthetic construct
  source 1..20: mol_type = other DNA
  modified_base 1: mod_base = OTHER; note = 2'-O-methoxyethyl 5-methylcytosine with phosphorothioate linkage
  modified_base 2: mod_base = OTHER; note = 2'-O-methoxyethyl modified nucleotide with phosphorothioate linkage
  modified_base 3: mod_base = OTHER; note = 2'-O-methoxyethyl modified nucleotide with phosphorothioate linkage
  modified_base 4: mod_base = OTHER; note = 2'-O-methoxyethyl modified nucleotide with phosphorothioate linkage
  modified_base 5: mod_base = OTHER; note = 2'-O-methoxyethyl modified nucleotide with phosphorothioate linkage
  modified_base 6: mod_base = OTHER; note = Nucleotide with phosphorothioate linkage
  modified_base 7: mod_base = OTHER; note = Thymine with phosphorothioate linkage
  modified_base 8: mod_base = OTHER; note = Nucleotide with phosphorothioate linkage
  modified_base 9: mod_base = OTHER; note = Nucleotide with phosphorothioate linkage
  modified_base 10: mod_base = OTHER; note = Nucleotide with phosphorothioate linkage
  modified_base 11: mod_base = OTHER; note = Nucleotide with phosphorothioate linkage
  modified_base 12: mod_base = OTHER; note = 5-methylcytosine with phosphorothioate linkage
  modified_base 13: mod_base = OTHER; note = Nucleotide with phosphorothioate linkage
  modified_base 14: mod_base = OTHER; note = Nucleotide with phosphorothioate linkage
  modified_base 15: mod_base = OTHER; note = Nucleotide with phosphorothioate linkage
  modified_base 16: mod_base = OTHER; note = 2'-O-methoxyethyl modified nucleotide with phosphorothioate linkage
  modified_base 17: mod_base = OTHER; note = 2'-O-methoxyethyl modified thymine with phosphorothioate linkage
  modified_base 18: mod_base = OTHER; note = 2'-O-methoxyethyl modified nucleotide with phosphorothioate linkage
  modified_base 19: mod_base = OTHER; note = Locked 5-methylcytosine with phosphorothioate linkage
  modified_base 20: mod_base = OTHER; note = Locked nucleic acid
  misc_feature 1..5: note = RNA
  misc_feature 6..15: note = DNA
  misc_feature 16..20: note = RNA
cagaggtgaagcgaagtgca

SEQ ID NO: 600 - DNA, 20 bp, synthetic construct
  source 1..20: mol_type = other DNA
  modified_base 1: mod_base = OTHER; note = 2'-O-methoxyethyl 5-methylcytosine with phosphorothioate linkage
  modified_base 2: mod_base = OTHER; note = 2'-O-methoxyethyl modified nucleotide with phosphorothioate linkage
  modified_base 3: mod_base = OTHER; note = 2'-O-methoxyethyl modified nucleotide with phosphorothioate linkage
  modified_base 4: mod_base = OTHER; note = 2'-O-methoxyethyl modified nucleotide with phosphorothioate linkage
  modified_base 5: mod_base = OTHER; note = 2'-O-methoxyethyl modified nucleotide with phosphorothioate linkage
  modified_base 6: mod_base = OTHER; note = Nucleotide with mesyl phosphoroamidate linkage
  modified_base 7: mod_base = OTHER; note = Thymine with phosphorothioate linkage
  modified_base 8: mod_base = OTHER; note = Nucleotide with phosphorothioate linkage
  modified_base 9: mod_base = OTHER; note = Nucleotide with phosphorothioate linkage
  modified_base 10: mod_base = OTHER; note = Nucleotide with phosphorothioate linkage
  modified_base 11: mod_base = OTHER; note = Nucleotide with phosphorothioate linkage
  modified_base 12: mod_base = OTHER; note = 5-methylcytosine with phosphorothioate linkage
  modified_base 13: mod_base = OTHER; note = Nucleotide with phosphorothioate linkage
  modified_base 14: mod_base = OTHER; note = Nucleotide with phosphorothioate linkage
  modified_base 15: mod_base = OTHER; note = Nucleotide with phosphorothioate linkage
  modified_base 16: mod_base = OTHER; note = 2'-O-methoxyethyl modified nucleotide with phosphorothioate linkage
  modified_base 17: mod_base = OTHER; note = 2'-O-methoxyethyl modified thymine with phosphorothioate linkage
  modified_base 18: mod_base = OTHER; note = 2'-O-methoxyethyl modified nucleotide with phosphorothioate linkage
  modified_base 19: mod_base = OTHER; note = 2'-O-methoxyethyl 5-methylcytosine with phosphorothioate linkage
  modified_base 20: mod_base = OTHER; note = 2'-O-methoxyethyl modified nucleotide
  misc_feature 1..5: note = RNA
  misc_feature 6..15: note = DNA
  misc_feature 16..20: note = RNA
cagaggtgaagcgaagtgca

SEQ ID NO: 601 - DNA, 20 bp, synthetic construct
  source 1..20: mol_type = other DNA
  modified_base 1: mod_base = OTHER; note = 2'-O-methoxyethyl 5-methylcytosine with phosphorothioate linkage
  modified_base 2: mod_base = OTHER; note = 2'-O-methoxyethyl modified nucleotide with phosphorothioate linkage
  modified_base 3: mod_base = OTHER; note = 2'-O-methoxyethyl modified nucleotide with phosphorothioate linkage
  modified_base 4: mod_base = OTHER; note = 2'-O-methoxyethyl modified nucleotide with phosphorothioate linkage
  modified_base 5: mod_base = OTHER; note = 2'-O-methoxyethyl modified nucleotide with mesyl phosphoroamidate linkage
  modified_base 6: mod_base = OTHER; note = Nucleotide with mesyl phosphoroamidate linkage
  modified_base 7: mod_base = OTHER; note = Thymine with phosphorothioate linkage
  modified_base 8: mod_base = OTHER; note = Nucleotide with phosphorothioate linkage
  modified_base 9: mod_base = OTHER; note = Nucleotide with phosphorothioate linkage
  modified_base 10: mod_base = OTHER; note = Nucleotide with phosphorothioate linkage
  modified_base 11: mod_base = OTHER; note = Nucleotide with phosphorothioate linkage
  modified_base 12: mod_base = OTHER; note = 5-methylcytosine with phosphorothioate linkage
  modified_base 13: mod_base = OTHER; note = Nucleotide with phosphorothioate linkage
  modified_base 14: mod_base = OTHER; note = Nucleotide with phosphorothioate linkage
  modified_base 15: mod_base = OTHER; note = Nucleotide with phosphorothioate linkage
  modified_base 16: mod_base = OTHER; note = 2'-O-methoxyethyl modified nucleotide with phosphorothioate linkage
  modified_base 17: mod_base = OTHER; note = 2'-O-methoxyethyl modified thymine with phosphorothioate linkage
  modified_base 18: mod_base = OTHER; note = 2'-O-methoxyethyl modified nucleotide with phosphorothioate linkage
  modified_base 19: mod_base = OTHER; note = 2'-O-methoxyethyl 5-methylcytosine with phosphorothioate linkage
  modified_base 20: mod_base = OTHER; note = 2'-O-methoxyethyl modified nucleotide
  misc_feature 1..5: note = RNA
  misc_feature 6..15: note = DNA
  misc_feature 16..20: note = RNA
cagaggtgaagcgaagtgca

SEQ ID NO: 602 - DNA, 20 bp, synthetic construct
  source 1..20: mol_type = other DNA
  modified_base 1: mod_base = OTHER; note = 2'-O-methoxyethyl 5-methylcytosine with phosphorothioate linkage
  modified_base 2: mod_base = OTHER; note = 2'-O-methoxyethyl modified nucleotide with phosphorothioate linkage
  modified_base 3: mod_base = OTHER; note = 2'-O-methoxyethyl modified nucleotide with phosphorothioate linkage
  modified_base 4: mod_base = OTHER; note = 2'-O-methoxyethyl modified nucleotide with phosphorothioate linkage
  modified_base 5: mod_base = OTHER; note = 2'-O-methoxyethyl modified nucleotide with phosphorothioate linkage
  modified_base 6: mod_base = OTHER; note = Nucleotide with mesyl phosphoroamidate linkage
  modified_base 7: mod_base = OTHER; note = Thymine with mesyl phosphoroamidate linkage
  modified_base 8: mod_base = OTHER; note = Nucleotide with phosphorothioate linkage
  modified_base 9: mod_base = OTHER; note = Nucleotide with phosphorothioate linkage
  modified_base 10: mod_base = OTHER; note = Nucleotide with phosphorothioate linkage
  modified_base 11: mod_base = OTHER; note = Nucleotide with phosphorothioate linkage
  modified_base 12: mod_base = OTHER; note = 5-methylcytosine with phosphorothioate linkage
  modified_base 13: mod_base = OTHER; note = Nucleotide with phosphorothioate linkage
  modified_base 14: mod_base = OTHER; note = Nucleotide with phosphorothioate linkage
  modified_base 15: mod_base = OTHER; note = Nucleotide with phosphorothioate linkage
  modified_base 16: mod_base = OTHER; note = 2'-O-methoxyethyl modified nucleotide with phosphorothioate linkage
  modified_base 17: mod_base = OTHER; note = 2'-O-methoxyethyl modified thymine with phosphorothioate linkage
  modified_base 18: mod_base = OTHER; note = 2'-O-methoxyethyl modified nucleotide with phosphorothioate linkage
  modified_base 19: mod_base = OTHER; note = 2'-O-methoxyethyl 5-methylcytosine with phosphorothioate linkage
  modified_base 20: mod_base = OTHER; note = 2'-O-methoxyethyl modified nucleotide
  misc_feature 1..5: note = RNA
  misc_feature 6..15: note = DNA
  misc_feature 16..20: note = RNA
cagaggtgaagcgaagtgca

SEQ ID NO: 603 - DNA, 20 bp, synthetic construct
  source 1..20: mol_type = other DNA
  modified_base 1: mod_base = OTHER; note = 2'-O-methoxyethyl 5-methylcytosine with phosphorothioate linkage
  modified_base 2: mod_base = OTHER; note = 2'-O-methoxyethyl modified nucleotide with phosphorothioate linkage
  modified_base 3: mod_base = OTHER; note = 2'-O-methoxyethyl modified nucleotide with phosphorothioate linkage
  modified_base 4: mod_base = OTHER; note = 2'-O-methoxyethyl modified nucleotide with phosphorothioate linkage
  modified_base 5: mod_base = OTHER; note = 2'-O-methoxyethyl modified nucleotide with phosphorothioate linkage
  modified_base 6: mod_base = OTHER; note = Nucleotide with phosphorothioate linkage
  modified_base 7: mod_base = OTHER; note = Thymine with mesyl phosphoroamidate linkage
  modified_base 8: mod_base = OTHER; note = Nucleotide with mesyl phosphoroamidate linkage
  modified_base 9: mod_base = OTHER; note = Nucleotide with phosphorothioate linkage
  modified_base 10: mod_base = OTHER; note = Nucleotide with phosphorothioate linkage
  modified_base 11: mod_base = OTHER; note = Nucleotide with phosphorothioate linkage
  modified_base 12: mod_base = OTHER; note = 5-methylcytosine with phosphorothioate linkage
  modified_base 13: mod_base = OTHER; note = Nucleotide with phosphorothioate linkage
  modified_base 14: mod_base = OTHER; note = Nucleotide with phosphorothioate linkage
  modified_base 15: mod_base = OTHER; note = Nucleotide with phosphorothioate linkage
  modified_base 16: mod_base = OTHER; note = 2'-O-methoxyethyl modified nucleotide with phosphorothioate linkage
  modified_base 17: mod_base = OTHER; note = 2'-O-methoxyethyl modified thymine with phosphorothioate linkage
  modified_base 18: mod_base = OTHER; note = 2'-O-methoxyethyl modified nucleotide with phosphorothioate linkage
  modified_base 19: mod_base = OTHER; note = 2'-O-methoxyethyl 5-methylcytosine with phosphorothioate linkage
  modified_base 20: mod_base = OTHER; note = 2'-O-methoxyethyl modified nucleotide
  misc_feature 1..5: note = RNA
  misc_feature 6..15: note = DNA
  misc_feature 16..20: note = RNA
cagaggtgaagcgaagtgca

SEQ ID NO: 604 - DNA, 20 bp, synthetic construct
  source 1..20: mol_type = other DNA
  modified_base 1: mod_base = OTHER; note = 2'-O-methoxyethyl 5-methylcytosine with phosphorothioate linkage
  modified_base 2: mod_base = OTHER; note = 2'-O-methoxyethyl modified nucleotide with phosphorothioate linkage
  modified_base 3: mod_base = OTHER; note = 2'-O-methoxyethyl modified nucleotide with phosphorothioate linkage
  modified_base 4: mod_base = OTHER; note = 2'-O-methoxyethyl modified nucleotide with phosphorothioate linkage
  modified_base 5: mod_base = OTHER; note = 2'-O-methoxyethyl modified nucleotide with phosphorothioate linkage
  modified_base 6: mod_base = OTHER; note = Nucleotide with phosphorothioate linkage
  modified_base 7: mod_base = OTHER; note = Thymine with phosphorothioate linkage
  modified_base 8: mod_base = OTHER; note = Nucleotide with mesyl phosphoroamidate linkage
  modified_base 9: mod_base = OTHER; note = Nucleotide with mesyl phosphoroamidate linkage
  modified_base 10: mod_base = OTHER; note = Nucleotide with phosphorothioate linkage
  modified_base 11: mod_base = OTHER; note = Nucleotide with phosphorothioate linkage
  modified_base 12: mod_base = OTHER; note = 5-methylcytosine with phosphorothioate linkage
  modified_base 13: mod_base = OTHER; note = Nucleotide with phosphorothioate linkage
  modified_base 14: mod_base = OTHER; note = Nucleotide with phosphorothioate linkage
  modified_base 15: mod_base = OTHER; note = Nucleotide with phosphorothioate linkage
  modified_base 16: mod_base = OTHER; note = 2'-O-methoxyethyl modified nucleotide with phosphorothioate linkage
  modified_base 17: mod_base = OTHER; note = 2'-O-methoxyethyl modified thymine with phosphorothioate linkage
  modified_base 18: mod_base = OTHER; note = 2'-O-methoxyethyl modified nucleotide with phosphorothioate linkage
  modified_base 19: mod_base = OTHER; note = 2'-O-methoxyethyl 5-methylcytosine with phosphorothioate linkage
  modified_base 20: mod_base = OTHER; note = 2'-O-methoxyethyl modified nucleotide
  misc_feature 1..5: note = RNA
  misc_feature 6..15: note = DNA
  misc_feature 16..20: note = RNA
cagaggtgaagcgaagtgca

SEQ ID NO: 605 - DNA, 20 bp, synthetic construct
  source 1..20: mol_type = other DNA
  modified_base 1: mod_base = OTHER; note = 2'-O-methoxyethyl 5-methylcytosine with phosphorothioate linkage
  modified_base 2: mod_base = OTHER; note = 2'-O-methoxyethyl modified nucleotide with phosphorothioate linkage
  modified_base 3: mod_base = OTHER; note = 2'-O-methoxyethyl modified nucleotide with phosphorothioate linkage
  modified_base 4: mod_base = OTHER; note = 2'-O-methoxyethyl modified nucleotide with phosphorothioate linkage
  modified_base 5: mod_base = OTHER; note = 2'-O-methoxyethyl modified nucleotide with phosphorothioate linkage
  modified_base 6: mod_base = OTHER; note = Nucleotide with phosphorothioate linkage
  modified_base 7: mod_base = OTHER; note = Thymine with phosphorothioate linkage
  modified_base 8: mod_base = OTHER; note = Nucleotide with phosphorothioate linkage
  modified_base 9: mod_base = OTHER; note = Nucleotide with mesyl phosphoroamidate linkage
  modified_base 10: mod_base = OTHER; note = Nucleotide with mesyl phosphoroamidate linkage
  modified_base 11: mod_base = OTHER; note = Nucleotide with phosphorothioate linkage
  modified_base 12: mod_base = OTHER; note = 5-methylcytosine with phosphorothioate linkage
  modified_base 13: mod_base = OTHER; note = Nucleotide with phosphorothioate linkage
  modified_base 14: mod_base = OTHER; note = Nucleotide with phosphorothioate linkage
  modified_base 15: mod_base = OTHER; note = Nucleotide with phosphorothioate linkage
  modified_base 16: mod_base = OTHER; note = 2'-O-methoxyethyl modified nucleotide with phosphorothioate linkage
  modified_base 17: mod_base = OTHER; note = 2'-O-methoxyethyl modified thymine with phosphorothioate linkage
  modified_base 18: mod_base = OTHER; note = 2'-O-methoxyethyl modified nucleotide with phosphorothioate linkage
  modified_base 19: mod_base = OTHER; note = 2'-O-methoxyethyl 5-methylcytosine with phosphorothioate linkage
  modified_base 20: mod_base = OTHER; note = 2'-O-methoxyethyl modified nucleotide
  misc_feature 1..5: note = RNA
  misc_feature 6..15: note = DNA
  misc_feature 16..20: note = RNA
cagaggtgaagcgaagtgca

SEQ ID NO: 606 - DNA, 20 bp, synthetic construct
  source 1..20: mol_type = other DNA
  modified_base 1: mod_base = OTHER; note = 2'-O-methoxyethyl 5-methylcytosine with phosphorothioate linkage
  modified_base 2: mod_base = OTHER; note = 2'-O-methoxyethyl modified nucleotide with phosphorothioate linkage
  modified_base 3: mod_base = OTHER; note = 2'-O-methoxyethyl modified nucleotide with phosphorothioate linkage
  modified_base 4: mod_base = OTHER; note = 2'-O-methoxyethyl modified nucleotide with phosphorothioate linkage
  modified_base 5: mod_base = OTHER; note = 2'-O-methoxyethyl modified nucleotide with phosphorothioate linkage
  modified_base 6: mod_base = OTHER; note = Nucleotide with phosphorothioate linkage
  modified_base 7: mod_base = OTHER; note = Thymine with phosphorothioate linkage
  modified_base 8: mod_base = OTHER; note = Nucleotide with phosphorothioate linkage
  modified_base 9: mod_base = OTHER; note = Nucleotide with phosphorothioate linkage
  modified_base 10: mod_base = OTHER; note = Nucleotide with mesyl phosphoroamidate linkage
  modified_base 11: mod_base = OTHER; note = Nucleotide with mesyl phosphoroamidate linkage
  modified_base 12: mod_base = OTHER; note = 5-methylcytosine with phosphorothioate linkage
  modified_base 13: mod_base = OTHER; note = Nucleotide with phosphorothioate linkage
  modified_base 14: mod_base = OTHER; note = Nucleotide with phosphorothioate linkage
  modified_base 15: mod_base = OTHER; note = Nucleotide with phosphorothioate linkage
  modified_base 16: mod_base = OTHER; note = 2'-O-methoxyethyl modified nucleotide with phosphorothioate linkage
  modified_base 17: mod_base = OTHER; note = 2'-O-methoxyethyl modified thymine with phosphorothioate linkage
  modified_base 18: mod_base = OTHER; note = 2'-O-methoxyethyl modified nucleotide with phosphorothioate linkage
  modified_base 19: mod_base = OTHER; note = 2'-O-methoxyethyl 5-methylcytosine with phosphorothioate linkage
  modified_base 20: mod_base = OTHER; note = 2'-O-methoxyethyl modified nucleotide
  misc_feature 1..5: note = RNA
  misc_feature 6..15: note = DNA
  misc_feature 16..20: note = RNA
cagaggtgaagcgaagtgca

SEQ ID NO: 607 - DNA, 20 bp, synthetic construct
  source 1..20: mol_type = other DNA
  modified_base 1: mod_base = OTHER; note = 2'-O-methoxyethyl 5-methylcytosine with phosphorothioate linkage
  modified_base 2: mod_base = OTHER; note = 2'-O-methoxyethyl modified nucleotide with phosphorothioate linkage
  modified_base 3: mod_base = OTHER; note = 2'-O-methoxyethyl modified nucleotide with phosphorothioate linkage
  modified_base 4: mod_base = OTHER; note = 2'-O-methoxyethyl modified nucleotide with phosphorothioate linkage
  modified_base 5: mod_base = OTHER; note = 2'-O-methoxyethyl modified nucleotide with phosphorothioate linkage
  modified_base 6: mod_base = OTHER; note = Nucleotide with phosphorothioate linkage
  modified_base 7: mod_base = OTHER; note = Thymine with phosphorothioate linkage
  modified_base 8: mod_base = OTHER; note = Nucleotide with phosphorothioate linkage
  modified_base 9: mod_base = OTHER; note = Nucleotide with phosphorothioate linkage
  modified_base 10: mod_base = OTHER; note = Nucleotide with phosphorothioate linkage
  modified_base 11: mod_base = OTHER; note = Nucleotide with mesyl phosphoroamidate linkage
  modified_base 12: mod_base = OTHER; note = 5-methylcytosine with mesyl phosphoroamidate linkage
  modified_base 13: mod_base = OTHER; note = Nucleotide with phosphorothioate linkage
  modified_base 14: mod_base = OTHER; note = Nucleotide with phosphorothioate linkage
  modified_base 15: mod_base = OTHER; note = Nucleotide with phosphorothioate linkage
  modified_base 16: mod_base = OTHER; note = 2'-O-methoxyethyl modified nucleotide with phosphorothioate linkage
  modified_base 17: mod_base = OTHER; note = 2'-O-methoxyethyl modified thymine with phosphorothioate linkage
  modified_base 18: mod_base = OTHER; note = 2'-O-methoxyethyl modified nucleotide with phosphorothioate linkage
  modified_base 19: mod_base = OTHER; note = 2'-O-methoxyethyl 5-methylcytosine with phosphorothioate linkage
  modified_base 20: mod_base = OTHER; note = 2'-O-methoxyethyl modified nucleotide
  misc_feature 1..5: note = RNA
  misc_feature 6..15: note = DNA
  misc_feature 16..20: note = RNA
cagaggtgaagcgaagtgca

SEQ ID NO: 608 - DNA, 20 bp, synthetic construct
  source 1..20: mol_type = other DNA
  modified_base 1: mod_base = OTHER; note = 2'-O-methoxyethyl 5-methylcytosine with phosphorothioate linkage
  modified_base 2: mod_base = OTHER; note = 2'-O-methoxyethyl modified nucleotide with phosphorothioate linkage
  modified_base 3: mod_base = OTHER; note = 2'-O-methoxyethyl modified nucleotide with phosphorothioate linkage
  modified_base 4: mod_base = OTHER; note = 2'-O-methoxyethyl modified nucleotide with phosphorothioate linkage
  modified_base 5: mod_base = OTHER; note = 2'-O-methoxyethyl modified nucleotide with phosphorothioate linkage
  modified_base 6: mod_base = OTHER; note = Nucleotide with phosphorothioate linkage
  modified_base 7: mod_base = OTHER; note = Thymine with phosphorothioate linkage
  modified_base 8: mod_base = OTHER; note = Nucleotide with phosphorothioate linkage
  modified_base 9: mod_base = OTHER; note = Nucleotide with phosphorothioate linkage
  modified_base 10: mod_base = OTHER; note = Nucleotide with phosphorothioate linkage
  modified_base 11: mod_base = OTHER; note = Nucleotide with phosphorothioate linkage
  modified_base 12: mod_base = OTHER; note = 5-methylcytosine with mesyl phosphoroamidate linkage
  modified_base 13: mod_base = OTHER; note = Nucleotide with mesyl phosphoroamidate linkage
  modified_base 14: mod_base = OTHER; note = Nucleotide with phosphorothioate linkage
  modified_base 15: mod_base = OTHER; note = Nucleotide with phosphorothioate linkage
  modified_base 16: mod_base = OTHER; note = 2'-O-methoxyethyl modified nucleotide with phosphorothioate linkage
  modified_base 17: mod_base = OTHER; note = 2'-O-methoxyethyl modified thymine with phosphorothioate linkage
  modified_base 18: mod_base = OTHER; note = 2'-O-methoxyethyl modified nucleotide with phosphorothioate linkage
  modified_base 19: mod_base = OTHER; note = 2'-O-methoxyethyl 5-methylcytosine with phosphorothioate linkage
  modified_base 20: mod_base = OTHER; note = 2'-O-methoxyethyl modified nucleotide
  misc_feature 1..5: note = RNA
  misc_feature 6..15: note = DNA
  misc_feature 16..20: note = RNA
cagaggtgaagcgaagtgca

SEQ ID NO: 609 - DNA, 20 bp, synthetic construct
  source 1..20: mol_type = other DNA
  modified_base 1: mod_base = OTHER; note = 2'-O-methoxyethyl 5-methylcytosine with phosphorothioate linkage
  modified_base 2: mod_base = OTHER; note = 2'-O-methoxyethyl modified nucleotide with phosphorothioate linkage
  modified_base 3: mod_base = OTHER; note = 2'-O-methoxyethyl modified nucleotide with phosphorothioate linkage
  modified_base 4: mod_base = OTHER; note = 2'-O-methoxyethyl modified nucleotide with phosphorothioate linkage
  modified_base 5: mod_base = OTHER; note = 2'-O-methoxyethyl modified nucleotide with phosphorothioate linkage
  modified_base 6: mod_base = OTHER; note = Nucleotide with phosphorothioate linkage
  modified_base 7: mod_base = OTHER; note = Thymine with phosphorothioate linkage
  modified_base 8: mod_base = OTHER; note = Nucleotide with phosphorothioate linkage
  modified_base 9: mod_base = OTHER; note = Nucleotide with phosphorothioate linkage
  modified_base 10: mod_base = OTHER; note = Nucleotide with phosphorothioate linkage
  modified_base 11: mod_base = OTHER; note = Nucleotide with phosphorothioate linkage
  modified_base 12: mod_base = OTHER; note = 5-methylcytosine with phosphorothioate linkage
  modified_base 13: mod_base = OTHER; note = Nucleotide with mesyl phosphoroamidate linkage
  modified_base 14: mod_base = OTHER; note = Nucleotide with mesyl phosphoroamidate linkage
  modified_base 15: mod_base = OTHER; note = Nucleotide with phosphorothioate linkage
  modified_base 16: mod_base = OTHER; note = 2'-O-methoxyethyl modified nucleotide with phosphorothioate linkage
  modified_base 17: mod_base = OTHER; note = 2'-O-methoxyethyl modified thymine with phosphorothioate linkage
  modified_base 18: mod_base = OTHER; note = 2'-O-methoxyethyl modified nucleotide with phosphorothioate linkage
  modified_base 19: mod_base = OTHER; note = 2'-O-methoxyethyl 5-methylcytosine with phosphorothioate linkage
  modified_base 20: mod_base = OTHER; note = 2'-O-methoxyethyl modified nucleotide
  misc_feature 1..5: note = RNA
  misc_feature 6..15: note = DNA
  misc_feature 16..20: note = RNA
cagaggtgaagcgaagtgca

SEQ ID NO: 610 - DNA, 20 bp, synthetic construct
  source 1..20: mol_type = other DNA
  modified_base 1: mod_base = OTHER; note = 2'-O-methoxyethyl 5-methylcytosine with phosphorothioate linkage
  modified_base 2: mod_base = OTHER; note = 2'-O-methoxyethyl modified nucleotide with phosphorothioate linkage
  modified_base 3: mod_base = OTHER; note = 2'-O-methoxyethyl modified nucleotide with phosphorothioate linkage
  modified_base 4: mod_base = OTHER; note = 2'-O-methoxyethyl modified nucleotide with phosphorothioate linkage
  modified_base 5: mod_base = OTHER; note = 2'-O-methoxyethyl modified nucleotide with phosphorothioate linkage
  modified_base 6: mod_base = OTHER; note = Nucleotide with phosphorothioate linkage
  modified_base 7: mod_base = OTHER; note = Thymine with phosphorothioate linkage
  modified_base 8: mod_base = OTHER; note = Nucleotide with phosphorothioate linkage
  modified_base 9: mod_base = OTHER; note = Nucleotide with phosphorothioate linkage
  modified_base 10: mod_base = OTHER; note = Nucleotide with phosphorothioate linkage
  modified_base 11: mod_base = OTHER; note = Nucleotide with phosphorothioate linkage
  modified_base 12: mod_base = OTHER; note = 5-methylcytosine with phosphorothioate linkage
  modified_base 13: mod_base = OTHER; note = Nucleotide with phosphorothioate linkage
  modified_base 14: mod_base = OTHER; note = Nucleotide with mesyl phosphoroamidate linkage
  modified_base 15: mod_base = OTHER; note = Nucleotide with mesyl phosphoroamidate linkage
  modified_base 16: mod_base = OTHER; note = 2'-O-methoxyethyl modified nucleotide with phosphorothioate linkage
  modified_base 17: mod_base = OTHER; note = 2'-O-methoxyethyl modified thymine with phosphorothioate linkage
  modified_base 18: mod_base = OTHER; note = 2'-O-methoxyethyl modified nucleotide with phosphorothioate linkage
  modified_base 19: mod_base = OTHER; note = 2'-O-methoxyethyl 5-methylcytosine with phosphorothioate linkage
  modified_base 20: mod_base = OTHER; note = 2'-O-methoxyethyl modified nucleotide
  misc_feature 1..5: note = RNA
  misc_feature 6..15: note = DNA
  misc_feature 16..20: note = RNA
cagaggtgaagcgaagtgca

SEQ ID NO: 611 - DNA, 21 bp, synthetic construct
  source 1..21: mol_type = other DNA
  modified_base 1: mod_base = OTHER; note = 2'-O-methoxyethyl modified nucleotide with phosphorothioate linkage
  modified_base 2: mod_base = OTHER; note = 2'-O-methoxyethyl modified nucleotide with phosphorothioate linkage
  modified_base 3: mod_base = OTHER; note = 2'-O-methoxyethyl modified nucleotide with phosphorothioate linkage
  modified_base 4: mod_base = OTHER; note = 2'-O-methoxyethyl modified thymine with phosphorothioate linkage
  modified_base 5: mod_base = OTHER; note = 2'-O-methoxyethyl modified nucleotide with phosphorothioate linkage
  modified_base 6: mod_base = OTHER; note = Nucleotide with phosphorothioate linkage
  modified_base 7: mod_base = OTHER; note = Nucleotide with phosphorothioate linkage
  modified_base 8: mod_base = OTHER; note = Nucleotide with phosphorothioate linkage
  modified_base 9: mod_base = OTHER; note = 5-methylcytosine with phosphorothioate linkage
  modified_base 10: mod_base = OTHER; note = Nucleotide with phosphorothioate linkage
  modified_base 11: mod_base = OTHER; note = Nucleotide with phosphorothioate linkage
  modified_base 12: mod_base = OTHER; note = Nucleotide with phosphorothioate linkage
  modified_base 13: mod_base = OTHER; note = Nucleotide with phosphorothioate linkage
  modified_base 14: mod_base = OTHER; note = Thymine with phosphorothioate linkage
  modified_base 15: mod_base = OTHER; note = Nucleotide with phosphorothioate linkage
  modified_base 16: mod_base = OTHER; note = 5-methylcytosine with phosphorothioate linkage
  modified_base 17: mod_base = OTHER; note = 2'-O-methoxyethyl modified nucleotide with phosphorothioate linkage
  modified_base 18: mod_base = OTHER; note = 2'-O-methoxyethyl 5-methylcytosine with phosphorothioate linkage
  modified_base 19: mod_base = OTHER; note = 2'-O-methoxyethyl modified nucleotide with phosphorothioate linkage
  modified_base 20: mod_base = OTHER; note = 2'-O-methoxyethyl 5-methylcytosine with phosphorothioate linkage
  modified_base 21: mod_base = OTHER; note = 2'-O-methoxyethyl modified nucleotide
  misc_feature 1..5: note = RNA
  misc_feature 6..16: note = DNA
  misc_feature 17..21: note = RNA
aggtgaagcgaagtgcacacg

SEQ ID NO: 612 - DNA, 21 bp, synthetic construct
  source 1..21: mol_type = other DNA
  modified_base 1: mod_base = OTHER; note = 2'-O-methoxyethyl modified nucleotide with phosphorothioate linkage
  modified_base 2: mod_base = OTHER; note = 2'-O-methoxyethyl modified nucleotide with phosphorothioate linkage
  modified_base 3: mod_base = OTHER; note = 2'-O-methoxyethyl modified nucleotide with phosphorothioate linkage
  modified_base 4: mod_base = OTHER; note = 2'-O-methoxyethyl modified thymine with phosphorothioate linkage
  modified_base 5: mod_base = OTHER; note = Nucleotide with phosphorothioate linkage
  modified_base 6: mod_base = OTHER; note = Nucleotide with phosphorothioate linkage
  modified_base 7: mod_base = OTHER; note = Nucleotide with phosphorothioate linkage
  modified_base 8: mod_base = OTHER; note = Nucleotide with phosphorothioate linkage
  modified_base 9: mod_base = OTHER; note = 5-methylcytosine with phosphorothioate linkage
  modified_base 10: mod_base = OTHER; note = Nucleotide with phosphorothioate linkage
  modified_base 11: mod_base = OTHER; note = Nucleotide with phosphorothioate linkage
  modified_base 12: mod_base = OTHER; note = Nucleotide with phosphorothioate linkage
  modified_base 13: mod_base = OTHER; note = Nucleotide with phosphorothioate linkage
  modified_base 14: mod_base = OTHER; note = Thymine with phosphorothioate linkage
  modified_base 15: mod_base = OTHER; note = 2'-O-methoxyethyl modified nucleotide with phosphorothioate linkage
  modified_base 16: mod_base = OTHER; note = 2'-O-methoxyethyl 5-methylcytosine with phosphorothioate linkage
  modified_base 17: mod_base = OTHER; note = 2'-O-methoxyethyl modified nucleotide with phosphorothioate linkage
  modified_base 18: mod_base = OTHER; note = 2'-O-methoxyethyl 5-methylcytosine with phosphorothioate linkage
  modified_base 19: mod_base = OTHER; note = 2'-O-methoxyethyl modified nucleotide with phosphorothioate linkage
  modified_base 20: mod_base = OTHER; note = 2'-O-methoxyethyl 5-methylcytosine with phosphorothioate linkage
  modified_base 21: mod_base = OTHER; note = 2'-O-methoxyethyl modified nucleotide
  misc_feature 1..4: note = RNA
  misc_feature 5..14: note = DNA
  misc_feature 15..21: note = RNA
aggtgaagcgaagtgcacacg

SEQ ID NO: 613 - DNA, 21 bp, synthetic construct
  source 1..21: mol_type = other DNA
  modified_base 1: mod_base = OTHER; note = 2'-O-methoxyethyl modified nucleotide with phosphorothioate linkage
  modified_base 2: mod_base = OTHER; note = 2'-O-methoxyethyl modified nucleotide with phosphorothioate linkage
  modified_base 3: mod_base = OTHER; note = 2'-O-methoxyethyl modified nucleotide with phosphorothioate linkage
  modified_base 4: mod_base = OTHER; note = 2'-O-methoxyethyl modified thymine with phosphorothioate linkage
  modified_base 5: mod_base = OTHER; note = 2'-O-methoxyethyl modified nucleotide with phosphorothioate linkage
  modified_base 6: mod_base = OTHER; note = Nucleotide with phosphorothioate linkage
  modified_base 7: mod_base = OTHER; note = Nucleotide with phosphorothioate linkage
  modified_base 8: mod_base = OTHER; note = Nucleotide with phosphorothioate linkage
  modified_base 9: mod_base = OTHER; note = 5-methylcytosine with phosphorothioate linkage
  modified_base 10: mod_base = OTHER; note = Nucleotide with phosphorothioate linkage
  modified_base 11: mod_base = OTHER; note = Nucleotide with phosphorothioate linkage
  modified_base 12: mod_base = OTHER; note = Nucleotide with phosphorothioate linkage
  modified_base 13: mod_base = OTHER; note = Nucleotide with phosphorothioate linkage
  modified_base 14: mod_base = OTHER; note = Thymine with phosphorothioate linkage
  modified_base 15: mod_base = OTHER; note = Nucleotide with phosphorothioate linkage
  modified_base 16: mod_base = OTHER; note = 2'-O-methoxyethyl 5-methylcytosine with phosphorothioate linkage
  modified_base 17: mod_base = OTHER; note = 2'-O-methoxyethyl modified nucleotide with phosphorothioate linkage
  modified_base 18: mod_base = OTHER; note = 2'-O-methoxyethyl 5-methylcytosine with phosphorothioate linkage
  modified_base 19: mod_base = OTHER; note = 2'-O-methoxyethyl modified nucleotide with phosphorothioate linkage
  modified_base 20: mod_base = OTHER; note = 2'-O-methoxyethyl 5-methylcytosine with phosphorothioate linkage
  modified_base 21: mod_base = OTHER; note = 2'-O-methoxyethyl modified nucleotide
  misc_feature 1..5: note = RNA
  misc_feature 6..15: note = DNA
  misc_feature 16..21: note = RNA
aggtgaagcgaagtgcacacg

SEQ ID NO: 614 - DNA, 21 bp, synthetic construct
  source 1..21: mol_type = other DNA
  modified_base 1: mod_base = OTHER; note = 2'-O-methoxyethyl modified nucleotide with phosphorothioate linkage
  modified_base 2: mod_base = OTHER; note = 2'-O-methoxyethyl modified nucleotide with phosphorothioate linkage
  modified_base 3: mod_base = OTHER; note = 2'-O-methoxyethyl modified nucleotide with phosphorothioate linkage
  modified_base 4: mod_base = OTHER; note = 2'-O-methoxyethyl modified thymine with phosphorothioate linkage
  modified_base 5: mod_base = OTHER; note = 2'-O-methoxyethyl modified nucleotide with phosphorothioate linkage
  modified_base 6: mod_base = OTHER; note = 2'-O-methoxyethyl modified nucleotide with phosphorothioate linkage
  modified_base 7: mod_base = OTHER; note = Nucleotide with phosphorothioate linkage
  modified_base 8: mod_base = OTHER; note = Nucleotide with phosphorothioate linkage
  modified_base 9: mod_base = OTHER; note = 5-methylcytosine with phosphorothioate linkage
  modified_base 10: mod_base = OTHER; note = Nucleotide with phosphorothioate linkage
  modified_base 11: mod_base = OTHER; note = Nucleotide with phosphorothioate linkage
  modified_base 12: mod_base = OTHER; note = Nucleotide with phosphorothioate linkage
  modified_base 13: mod_base = OTHER; note = Nucleotide with phosphorothioate linkage
  modified_base 14: mod_base = OTHER; note = Thymine with phosphorothioate linkage
  modified_base 15: mod_base = OTHER; note = Nucleotide with phosphorothioate linkage
  modified_base 16: mod_base = OTHER; note = 5-methylcytosine with phosphorothioate linkage
  modified_base 17: mod_base = OTHER; note = 2'-O-methoxyethyl modified nucleotide with phosphorothioate linkage
  modified_base 18: mod_base = OTHER; note = 2'-O-methoxyethyl 5-methylcytosine with phosphorothioate linkage
  modified_base 19: mod_base = OTHER; note = 2'-O-methoxyethyl modified nucleotide with phosphorothioate linkage
  modified_base 20: mod_base = OTHER; note = 2'-O-methoxyethyl 5-methylcytosine with phosphorothioate linkage
  modified_base 21: mod_base = OTHER; note = 2'-O-methoxyethyl modified nucleotide
  misc_feature 1..6: note = RNA
  misc_feature 7..16: note = DNA
  misc_feature 17..21: note = RNA
aggtgaagcgaagtgcacacg

SEQ ID NO: 615 - DNA, 21 bp, synthetic construct
  source 1..21: mol_type = other DNA
  modified_base 1: mod_base = OTHER; note = 2'-O-methoxyethyl modified nucleotide with phosphorothioate linkage
  modified_base 2: mod_base = OTHER; note = 2'-O-methoxyethyl modified nucleotide with phosphorothioate linkage
  modified_base 3: mod_base = OTHER; note = 2'-O-methoxyethyl modified nucleotide with phosphorothioate linkage
  modified_base 4: mod_base = OTHER; note = 2'-O-methoxyethyl modified thymine with phosphorothioate linkage
  modified_base 5: mod_base = OTHER; note = 2'-O-methoxyethyl modified nucleotide with phosphorothioate linkage
  modified_base 6: mod_base = OTHER; note = 2'-O-methoxyethyl modified nucleotide with phosphorothioate linkage
  modified_base 7: mod_base = OTHER; note = 2'-O-methoxyethyl modified nucleotide with phosphorothioate linkage
  modified_base 8: mod_base = OTHER; note = Nucleotide with phosphorothioate linkage
  modified_base 9: mod_base = OTHER; note = 5-methylcytosine with phosphorothioate linkage
  modified_base 10: mod_base = OTHER; note = Nucleotide with phosphorothioate linkage
  modified_base 11: mod_base = OTHER; note = Nucleotide with phosphorothioate linkage
  modified_base 12: mod_base = OTHER; note = Nucleotide with phosphorothioate linkage
  modified_base 13: mod_base = OTHER; note = Nucleotide with phosphorothioate linkage
  modified_base 14: mod_base = OTHER; note = Thymine with phosphorothioate linkage
  modified_base 15: mod_base = OTHER; note = Nucleotide with phosphorothioate linkage
  modified_base 16: mod_base = OTHER; note = 5-methylcytosine with phosphorothioate linkage
  modified_base 17: mod_base = OTHER; note = Nucleotide with phosphorothioate linkage
  modified_base 18: mod_base = OTHER; note = 2'-O-methoxyethyl 5-methylcytosine with phosphorothioate linkage
  modified_base 19: mod_base = OTHER; note = 2'-O-methoxyethyl modified nucleotide with phosphorothioate linkage
  modified_base 20: mod_base = OTHER; note = 2'-O-methoxyethyl 5-methylcytosine with phosphorothioate linkage
  modified_base 21: mod_base = OTHER; note = 2'-O-methoxyethyl modified nucleotide
  misc_feature 1..7: note = RNA
  misc_feature 8..17: note = DNA
  misc_feature 18..21: note = RNA
aggtgaagcgaagtgcacacg

SEQ ID NO: 616 - DNA, 21 bp, synthetic construct
  source 1..21: mol_type = other DNA
  modified_base 1: mod_base = OTHER; note = 2'-O-methoxyethyl modified nucleotide with phosphorothioate linkage
  modified_base 2: mod_base = OTHER; note = 2'-O-methoxyethyl modified nucleotide with phosphorothioate linkage
  modified_base 3: mod_base = OTHER; note = 2'-O-methoxyethyl modified nucleotide with phosphorothioate linkage
  modified_base 4: mod_base = OTHER; note = 2'-O-methoxyethyl modified thymine with phosphorothioate linkage
  modified_base 5: mod_base = OTHER; note = Nucleotide with phosphorothioate linkage
  modified_base 6: mod_base = OTHER; note = Nucleotide with phosphorothioate linkage
  modified_base 7: mod_base = OTHER; note = Nucleotide with phosphorothioate linkage
  modified_base 8: mod_base = OTHER; note = Nucleotide with phosphorothioate linkage
  modified_base 9: mod_base = OTHER; note = 5-methylcytosine with phosphorothioate linkage
  modified_base 10: mod_base = OTHER; note = Nucleotide with phosphorothioate linkage
  modified_base 11: mod_base = OTHER; note = Nucleotide with phosphorothioate linkage
  modified_base 12: mod_base = OTHER; note = Nucleotide with phosphorothioate linkage
  modified_base 13: mod_base = OTHER; note = Nucleotide with phosphorothioate linkage
  modified_base 14: mod_base = OTHER; note = 2'-O-methoxyethyl modified thymine with phosphorothioate linkage
  modified_base 15: mod_base = OTHER; note = 2'-O-methoxyethyl modified nucleotide with phosphorothioate linkage
  modified_base 16: mod_base = OTHER; note = 2'-O-methoxyethyl 5-methylcytosine with phosphorothioate linkage
  modified_base 17: mod_base = OTHER; note = 2'-O-methoxyethyl modified nucleotide with phosphorothioate linkage
  modified_base 18: mod_base = OTHER; note = 2'-O-methoxyethyl 5-methylcytosine with phosphorothioate linkage
  modified_base 19: mod_base = OTHER; note = 2'-O-methoxyethyl modified nucleotide with phosphorothioate linkage
  modified_base 20: mod_base = OTHER; note = 2'-O-methoxyethyl 5-methylcytosine with phosphorothioate linkage
  modified_base 21: mod_base = OTHER; note = 2'-O-methoxyethyl modified nucleotide
  misc_feature 1..4: note = RNA
  misc_feature 5..13: note = DNA
  misc_feature 14..21: note = RNA
aggtgaagcgaagtgcacacg

SEQ ID NO: 617 - DNA, 21 bp, synthetic construct
  source 1..21: mol_type = other DNA
  modified_base 1: mod_base = OTHER; note = 2'-O-methoxyethyl modified nucleotide with phosphorothioate linkage
  modified_base 2: mod_base = OTHER; note = 2'-O-methoxyethyl modified nucleotide with phosphorothioate linkage
  modified_base 3: mod_base = OTHER; note = 2'-O-methoxyethyl modified nucleotide with phosphorothioate linkage
  modified_base 4: mod_base = OTHER; note = 2'-O-methoxyethyl modified thymine with phosphorothioate linkage
  modified_base 5: mod_base = OTHER; note = 2'-O-methoxyethyl modified nucleotide with phosphorothioate linkage
  modified_base 6: mod_base = OTHER; note = Nucleotide with phosphorothioate linkage
  modified_base 7: mod_base = OTHER; note = Nucleotide with phosphorothioate linkage
  modified_base 8: mod_base = OTHER; note = Nucleotide with phosphorothioate linkage
  modified_base 9: mod_base = OTHER; note = 5-methylcytosine with phosphorothioate linkage
  modified_base 10: mod_base = OTHER; note = Nucleotide with phosphorothioate linkage
  modified_base 11: mod_base = OTHER; note = Nucleotide with phosphorothioate linkage
  modified_base 12: mod_base = OTHER; note = Nucleotide with phosphorothioate linkage
  modified_base 13: mod_base = OTHER; note = Nucleotide with phosphorothioate linkage
  modified_base 14: mod_base = OTHER; note = Thymine with phosphorothioate linkage
  modified_base 15: mod_base = OTHER; note = 2'-O-methoxyethyl modified nucleotide with phosphorothioate linkage
  modified_base 16: mod_base = OTHER; note = 2'-O-methoxyethyl 5-methylcytosine with phosphorothioate linkage
  modified_base 17: mod_base = OTHER; note = 2'-O-methoxyethyl modified nucleotide with phosphorothioate linkage
  modified_base 18: mod_base = OTHER; note = 2'-O-methoxyethyl 5-methylcytosine with phosphorothioate linkage
  modified_base 19: mod_base = OTHER; note = 2'-O-methoxyethyl modified nucleotide with phosphorothioate linkage
  modified_base 20: mod_base = OTHER; note = 2'-O-methoxyethyl 5-methylcytosine with phosphorothioate linkage
  modified_base 21: mod_base = OTHER; note = 2'-O-methoxyethyl modified nucleotide
  misc_feature 1..5: note = RNA
  misc_feature 6..14: note = DNA
  misc_feature 15..21: note = RNA
aggtgaagcgaagtgcacacg

SEQ ID NO: 618 - DNA, 21 bp, synthetic construct
  source 1..21: mol_type = other DNA
  modified_base 1: mod_base = OTHER; note = 2'-O-methoxyethyl modified nucleotide with phosphorothioate linkage
  modified_base 2: mod_base = OTHER; note = 2'-O-methoxyethyl modified nucleotide with phosphorothioate linkage
  modified_base 3: mod_base = OTHER; note = 2'-O-methoxyethyl modified nucleotide with phosphorothioate linkage
  modified_base 4: mod_base = OTHER; note = 2'-O-methoxyethyl modified thymine with phosphorothioate linkage
  modified_base 5: mod_base = OTHER; note = 2'-O-methoxyethyl modified nucleotide with phosphorothioate linkage
  modified_base 6: mod_base = OTHER; note = 2'-O-methoxyethyl modified nucleotide with phosphorothioate linkage
  modified_base 7: mod_base = OTHER; note = Nucleotide with phosphorothioate linkage
  modified_base 8: mod_base = OTHER; note = Nucleotide with phosphorothioate linkage
  modified_base 9: mod_base = OTHER; note = 5-methylcytosine with phosphorothioate linkage
  modified_base 10: mod_base = OTHER; note = Nucleotide with phosphorothioate linkage
  modified_base 11: mod_base = OTHER; note = Nucleotide with phosphorothioate linkage
  modified_base 12: mod_base = OTHER; note = Nucleotide with phosphorothioate linkage
  modified_base 13: mod_base = OTHER; note = Nucleotide with phosphorothioate linkage
  modified_base 14: mod_base = OTHER; note = Thymine with phosphorothioate linkage
  modified_base 15: mod_base = OTHER; note = Nucleotide with phosphorothioate linkage
  modified_base 16: mod_base = OTHER; note = 2'-O-methoxyethyl 5-methylcytosine with phosphorothioate linkage
  modified_base 17: mod_base = OTHER; note = 2'-O-methoxyethyl modified nucleotide with phosphorothioate linkage
  modified_base 18: mod_base = OTHER; note = 2'-O-methoxyethyl 5-methylcytosine with phosphorothioate linkage
  modified_base 19: mod_base = OTHER; note = 2'-O-methoxyethyl modified nucleotide with phosphorothioate linkage
  modified_base 20: mod_base = OTHER; note = 2'-O-methoxyethyl 5-methylcytosine with phosphorothioate linkage
  modified_base 21: mod_base = OTHER; note = 2'-O-methoxyethyl modified nucleotide
  misc_feature 1..6: note = RNA
  misc_feature 7..15: note = DNA
  misc_feature 16..21: note = RNA
aggtgaagcgaagtgcacacg

SEQ ID NO: 619 - DNA, 21 bp, synthetic construct
  source 1..21: mol_type = other DNA
  modified_base 1: mod_base = OTHER; note = 2'-O-methoxyethyl modified nucleotide with phosphorothioate linkage
  modified_base 2: mod_base = OTHER; note = 2'-O-methoxyethyl modified nucleotide with phosphorothioate linkage
  modified_base 3: mod_base = OTHER; note = 2'-O-methoxyethyl modified nucleotide with phosphorothioate linkage
  modified_base 4: mod_base = OTHER; note = 2'-O-methoxyethyl modified thymine with phosphorothioate linkage
  modified_base 5: mod_base = OTHER; note = 2'-O-methoxyethyl modified nucleotide with phosphorothioate linkage
  modified_base 6: mod_base = OTHER; note = 2'-O-methoxyethyl modified nucleotide with phosphorothioate linkage
  modified_base 7: mod_base = OTHER; note = 2'-O-methoxyethyl modified nucleotide with phosphorothioate linkage
  modified_base 8: mod_base = OTHER; note = Nucleotide with phosphorothioate linkage
  modified_base 9: mod_base = OTHER; note = 5-methylcytosine with phosphorothioate linkage
  modified_base 10: mod_base = OTHER; note = Nucleotide with phosphorothioate linkage
  modified_base 11: mod_base = OTHER; note = Nucleotide with phosphorothioate linkage
  modified_base 12: mod_base = OTHER; note = Nucleotide with phosphorothioate linkage
  modified_base 13: mod_base = OTHER; note = Nucleotide with phosphorothioate linkage
  modified_base 14: mod_base = OTHER; note = Thymine with phosphorothioate linkage
  modified_base 15: mod_base = OTHER; note = Nucleotide with phosphorothioate linkage
  modified_base 16: mod_base = OTHER; note = 5-methylcytosine with phosphorothioate linkage
  modified_base 17: mod_base = OTHER; note = 2'-O-methoxyethyl modified nucleotide with phosphorothioate linkage
  modified_base 18: mod_base = OTHER; note = 2'-O-methoxyethyl 5-methylcytosine with phosphorothioate linkage
  modified_base 19: mod_base = OTHER; note = 2'-O-methoxyethyl modified nucleotide with phosphorothioate linkage
  modified_base 20: mod_base = OTHER; note = 2'-O-methoxyethyl 5-methylcytosine with phosphorothioate linkage
  modified_base 21: mod_base = OTHER; note = 2'-O-methoxyethyl modified nucleotide
  misc_feature 1..7: note = RNA
  misc_feature 8..16: note = DNA
  misc_feature 17..21: note = RNA
aggtgaagcgaagtgcacacg

SEQ ID NO: 620 - DNA, 21 bp, synthetic construct
  source 1..21: mol_type = other DNA
  modified_base 1: mod_base = OTHER; note = 2'-O-methoxyethyl modified nucleotide with phosphorothioate linkage
  modified_base 2: mod_base = OTHER; note = 2'-O-methoxyethyl modified nucleotide with phosphorothioate linkage
  modified_base 3: mod_base = OTHER; note = 2'-O-methoxyethyl modified nucleotide with phosphorothioate linkage
  modified_base 4: mod_base = OTHER; note = 2'-O-methoxyethyl modified thymine with phosphorothioate linkage
  modified_base 5: mod_base = OTHER; note = 2'-O-methoxyethyl modified nucleotide with phosphorothioate linkage
  modified_base 6: mod_base = OTHER; note = 2'-O-methoxyethyl modified nucleotide with phosphorothioate linkage
  modified_base 7: mod_base = OTHER; note = 2'-O-methoxyethyl modified nucleotide with phosphorothioate linkage
  modified_base 8: mod_base = OTHER; note = 2'-O-methoxyethyl modified nucleotide with phosphorothioate linkage
  modified_base 9: mod_base = OTHER; note = 5-methylcytosine with phosphorothioate linkage
  modified_base 10: mod_base = OTHER; note = Nucleotide with phosphorothioate linkage
  modified_base 11: mod_base = OTHER; note = Nucleotide with phosphorothioate linkage
  modified_base 12: mod_base = OTHER; note = Nucleotide with phosphorothioate linkage
  modified_base 13: mod_base = OTHER; note = Nucleotide with phosphorothioate linkage
  modified_base 14: mod_base = OTHER; note = Thymine with phosphorothioate linkage
  modified_base 15: mod_base = OTHER; note = Nucleotide with phosphorothioate linkage
  modified_base 16: mod_base = OTHER; note = 5-methylcytosine with phosphorothioate linkage
  modified_base 17: mod_base = OTHER; note = Nucleotide with phosphorothioate linkage
  modified_base 18: mod_base = OTHER; note = 2'-O-methoxyethyl 5-methylcytosine with phosphorothioate linkage
  modified_base 19: mod_base = OTHER; note = 2'-O-methoxyethyl modified nucleotide with phosphorothioate linkage
  modified_base 20: mod_base = OTHER; note = 2'-O-methoxyethyl 5-methylcytosine with phosphorothioate linkage
  modified_base 21: mod_base = OTHER; note = 2'-O-methoxyethyl modified nucleotide
  misc_feature 1..8: note = RNA
  misc_feature 9..17: note = DNA
  misc_feature 18..21: note = RNA
aggtgaagcgaagtgcacacg

SEQ ID NO: 621 - DNA, 21 bp, synthetic construct
  source 1..21: mol_type = other DNA
  modified_base 1: mod_base = OTHER; note = 2'-O-methoxyethyl modified nucleotide with phosphorothioate linkage
  modified_base 2: mod_base = OTHER; note = 2'-O-methoxyethyl modified nucleotide with phosphorothioate linkage
  modified_base 3: mod_base = OTHER; note = 2'-O-methoxyethyl modified nucleotide with phosphorothioate linkage
  modified_base 4: mod_base = OTHER; note = 2'-O-methoxyethyl modified thymine with phosphorothioate linkage
  modified_base 5: mod_base = OTHER; note = 2'-O-methoxyethyl modified nucleotide with phosphorothioate linkage
  modified_base 6: mod_base = OTHER; note = 2'-O-methoxyethyl modified nucleotide with phosphorothioate linkage
  modified_base 7: mod_base = OTHER; note = Nucleotide with phosphorothioate linkage
  modified_base 8: mod_base = OTHER; note = Nucleotide with phosphorothioate linkage
  modified_base 9: mod_base = OTHER; note = 5-methylcytosine with phosphorothioate linkage
  modified_base 10: mod_base = OTHER; note = Nucleotide with phosphorothioate linkage
  modified_base 11: mod_base = OTHER; note = Nucleotide with phosphorothioate linkage
  modified_base 12: mod_base = OTHER; note = Nucleotide with phosphorothioate linkage
  modified_base 13: mod_base = OTHER; note = Nucleotide with phosphorothioate linkage
  modified_base 14: mod_base = OTHER; note = Thymine with phosphorothioate linkage
  modified_base 15: mod_base = OTHER; note = 2'-O-methoxyethyl modified nucleotide with phosphorothioate linkage
  modified_base 16: mod_base = OTHER; note = 2'-O-methoxyethyl 5-methylcytosine with phosphorothioate linkage
  modified_base 17: mod_base = OTHER; note = 2'-O-methoxyethyl modified nucleotide with phosphorothioate linkage
  modified_base 18: mod_base = OTHER; note = 2'-O-methoxyethyl 5-methylcytosine with phosphorothioate linkage
  modified_base 19: mod_base = OTHER; note = 2'-O-methoxyethyl modified nucleotide with phosphorothioate linkage
  modified_base 20: mod_base = OTHER; note = 2'-O-methoxyethyl 5-methylcytosine with phosphorothioate linkage
  modified_base 21: mod_base = OTHER; note = 2'-O-methoxyethyl modified nucleotide
  misc_feature 1..6: note = RNA
  misc_feature 7..14: note = DNA
  misc_feature 15..21: note = RNA
aggtgaagcgaagtgcacacg

SEQ ID NO: 622 - DNA, 21 bp, synthetic construct
  source 1..21: mol_type = other DNA
  modified_base 1: mod_base = OTHER; note = 2'-O-methoxyethyl modified nucleotide with phosphorothioate linkage
  modified_base 2: mod_base = OTHER; note = 2'-O-methoxyethyl modified nucleotide with phosphorothioate linkage
  modified_base 3: mod_base = OTHER; note = 2'-O-methoxyethyl modified nucleotide with phosphorothioate linkage
  modified_base 4: mod_base = OTHER; note = 2'-O-methoxyethyl modified thymine with phosphorothioate linkage
  modified_base 5: mod_base = OTHER; note = 2'-O-methoxyethyl modified nucleotide with phosphorothioate linkage
  modified_base 6: mod_base = OTHER; note = 2'-O-methoxyethyl modified nucleotide with phosphorothioate linkage
  modified_base 7: mod_base = OTHER; note = 2'-O-methoxyethyl modified nucleotide with phosphorothioate linkage
  modified_base 8: mod_base = OTHER; note = Nucleotide with phosphorothioate linkage
  modified_base 9: mod_base = OTHER; note = 5-methylcytosine with phosphorothioate linkage
  modified_base 10: mod_base = OTHER; note = Nucleotide with phosphorothioate linkage
  modified_base 11: mod_base = OTHER; note = Nucleotide with phosphorothioate linkage
  modified_base 12: mod_base = OTHER; note = Nucleotide with phosphorothioate linkage
  modified_base 13: mod_base = OTHER; note = Nucleotide with phosphorothioate linkage
  modified_base 14: mod_base = OTHER; note = Thymine with phosphorothioate linkage
  modified_base 15: mod_base = OTHER; note = Nucleotide with phosphorothioate linkage
  modified_base 16: mod_base = OTHER; note = 2'-O-methoxyethyl 5-methylcytosine with phosphorothioate linkage
  modified_base 17: mod_base = OTHER; note = 2'-O-methoxyethyl modified nucleotide with phosphorothioate linkage
  modified_base 18: mod_base = OTHER; note = 2'-O-methoxyethyl 5-methylcytosine with phosphorothioate linkage
  modified_base 19: mod_base = OTHER; note = 2'-O-methoxyethyl modified nucleotide with phosphorothioate linkage
  modified_base 20: mod_base = OTHER; note = 2'-O-methoxyethyl 5-methylcytosine with phosphorothioate linkage
  modified_base 21: mod_base = OTHER; note = 2'-O-methoxyethyl modified nucleotide
  misc_feature 1..7: note = RNA
  misc_feature 8..15: note = DNA
  misc_feature 16..21: note = RNA
aggtgaagcgaagtgcacacg

SEQ ID NO: 623 - DNA, 20 bp, synthetic construct
  source 1..20: mol_type = other DNA
  modified_base 1: mod_base = OTHER; note = 2'-O-methoxyethyl 5-methylcytosine with phosphorothioate linkage
  modified_base 2: mod_base = OTHER; note = 2'-O-methoxyethyl modified nucleotide with phosphorothioate linkage
  modified_base 3: mod_base = OTHER; note = 2'-O-methoxyethyl modified nucleotide with phosphorothioate linkage
  modified_base 4: mod_base = OTHER; note = 2'-O-methoxyethyl modified nucleotide with phosphorothioate linkage
  modified_base 5: mod_base = OTHER; note = 2'-O-methoxyethyl modified nucleotide with phosphorothioate linkage
  modified_base 6: mod_base = OTHER; note = Nucleotide with phosphorothioate linkage
  modified_base 7: mod_base = OTHER; note = Thymine with mesyl phosphoroamidate linkage
  modified_base 8: mod_base = OTHER; note = Nucleotide with phosphorothioate linkage
  modified_base 9: mod_base = OTHER; note = Nucleotide with phosphorothioate linkage
  modified_base 10: mod_base = OTHER; note = Nucleotide with phosphorothioate linkage
  modified_base 11: mod_base = OTHER; note = Nucleotide with phosphorothioate linkage
  modified_base 12: mod_base = OTHER; note = 5-methylcytosine with phosphorothioate linkage
  modified_base 13: mod_base = OTHER; note = Nucleotide with phosphorothioate linkage
  modified_base 14: mod_base = OTHER; note = Nucleotide with phosphorothioate linkage
  modified_base 15: mod_base = OTHER; note = Nucleotide with phosphorothioate linkage
  modified_base 16: mod_base = OTHER; note = 2'-O-methoxyethyl modified nucleotide with phosphorothioate linkage
  modified_base 17: mod_base = OTHER; note = 2'-O-methoxyethyl modified thymine with phosphorothioate linkage
  modified_base 18: mod_base = OTHER; note = 2'-O-methoxyethyl modified nucleotide with phosphorothioate linkage
  modified_base 19: mod_base = OTHER; note = 2'-O-methoxyethyl 5-methylcytosine with phosphorothioate linkage
  modified_base 20: mod_base = OTHER; note = 2'-O-methoxyethyl modified nucleotide
  misc_feature 1..5: note = RNA
  misc_feature 6..15: note = DNA
  misc_feature 16..20: note = RNA
cagaggtgaagcgaagtgca

SEQ ID NO: 624 - DNA, 20 bp, synthetic construct
  source 1..20: mol_type = other DNA
  modified_base 1: mod_base = OTHER; note = 2'-O-methoxyethyl 5-methylcytosine with phosphorothioate linkage
  modified_base 2: mod_base = OTHER; note = 2'-O-methoxyethyl modified nucleotide with phosphorothioate linkage
  modified_base 3: mod_base = OTHER; note = 2'-O-methoxyethyl modified nucleotide with phosphorothioate linkage
  modified_base 4: mod_base = OTHER; note = 2'-O-methoxyethyl modified nucleotide with phosphorothioate linkage
  modified_base 5: mod_base = OTHER; note = 2'-O-methoxyethyl modified nucleotide with phosphorothioate linkage
  modified_base 6: mod_base = OTHER; note = Nucleotide with phosphorothioate linkage
  modified_base 7: mod_base = OTHER; note = Thymine with phosphorothioate linkage
  modified_base 8: mod_base = OTHER; note = Nucleotide with mesyl phosphoroamidate linkage
  modified_base 9: mod_base = OTHER; note = Nucleotide with phosphorothioate linkage
  modified_base 10: mod_base = OTHER; note = Nucleotide with phosphorothioate linkage
  modified_base 11: mod_base = OTHER; note = Nucleotide with phosphorothioate linkage
  modified_base 12: mod_base = OTHER; note = 5-methylcytosine with phosphorothioate linkage
  modified_base 13: mod_base = OTHER; note = Nucleotide with phosphorothioate linkage
  modified_base 14: mod_base = OTHER; note = Nucleotide with phosphorothioate linkage
  modified_base 15: mod_base = OTHER; note = Nucleotide with phosphorothioate linkage
  modified_base 16: mod_base = OTHER; note = 2'-O-methoxyethyl modified nucleotide with phosphorothioate linkage
  modified_base 17: mod_base = OTHER; note = 2'-O-methoxyethyl modified thymine with phosphorothioate linkage
  modified_base 18: mod_base = OTHER; note = 2'-O-methoxyethyl modified nucleotide with phosphorothioate linkage
  modified_base 19: mod_base = OTHER; note = 2'-O-methoxyethyl 5-methylcytosine with phosphorothioate linkage
  modified_base 20: mod_base = OTHER; note = 2'-O-methoxyethyl modified nucleotide
  misc_feature 1..5: note = RNA
  misc_feature 6..15: note = DNA
  misc_feature 16..20: note = RNA
cagaggtgaagcgaagtgca

SEQ ID NO: 625 - DNA, 20 bp, synthetic construct
  source 1..20: mol_type = other DNA
  modified_base 1: mod_base = OTHER; note = 2'-O-methoxyethyl 5-methylcytosine with phosphorothioate linkage
  modified_base 2: mod_base = OTHER; note = 2'-O-methoxyethyl modified nucleotide with phosphorothioate linkage
  modified_base 3: mod_base = OTHER; note = 2'-O-methoxyethyl modified nucleotide with phosphorothioate linkage
  modified_base 4: mod_base = OTHER; note = 2'-O-methoxyethyl modified nucleotide with phosphorothioate linkage
  modified_base 5: mod_base = OTHER; note = 2'-O-methoxyethyl modified nucleotide with phosphorothioate linkage
  modified_base 6: mod_base = OTHER; note = Nucleotide with phosphorothioate linkage
  modified_base 7: mod_base = OTHER; note = Thymine with phosphorothioate linkage
  modified_base 8: mod_base = OTHER; note = Nucleotide with phosphorothioate linkage
  modified_base 9: mod_base = OTHER; note = Nucleotide with mesyl phosphoroamidate linkage
  modified_base 10: mod_base = OTHER; note = Nucleotide with phosphorothioate linkage
  modified_base 11: mod_base = OTHER; note = Nucleotide with phosphorothioate linkage
  modified_base 12: mod_base = OTHER; note = 5-methylcytosine with phosphorothioate linkage
  modified_base 13: mod_base = OTHER; note = Nucleotide with phosphorothioate linkage
  modified_base 14: mod_base = OTHER; note = Nucleotide with phosphorothioate linkage
  modified_base 15: mod_base = OTHER; note = Nucleotide with phosphorothioate linkage
  modified_base 16: mod_base = OTHER; note = 2'-O-methoxyethyl modified nucleotide with phosphorothioate linkage
  modified_base 17: mod_base = OTHER; note = 2'-O-methoxyethyl modified thymine with phosphorothioate linkage
  modified_base 18: mod_base = OTHER; note = 2'-O-methoxyethyl modified nucleotide with phosphorothioate linkage
  modified_base 19: mod_base = OTHER; note = 2'-O-methoxyethyl 5-methylcytosine with phosphorothioate linkage
  modified_base 20: mod_base = OTHER; note = 2'-O-methoxyethyl modified nucleotide
  misc_feature 1..5: note = RNA
  misc_feature 6..15: note = DNA
  misc_feature 16..20: note = RNA
cagaggtgaagcgaagtgca

SEQ ID NO: 626 - DNA, 20 bp, synthetic construct
  source 1..20: mol_type = other DNA
  modified_base 1: mod_base = OTHER; note = 2'-O-methoxyethyl 5-methylcytosine with phosphorothioate linkage
  modified_base 2: mod_base = OTHER; note = 2'-O-methoxyethyl modified nucleotide with phosphorothioate linkage
  modified_base 3: mod_base = OTHER; note = 2'-O-methoxyethyl modified nucleotide with phosphorothioate linkage
  modified_base 4: mod_base = OTHER; note = 2'-O-methoxyethyl modified nucleotide with phosphorothioate linkage
  modified_base 5: mod_base = OTHER; note = 2'-O-methoxyethyl modified nucleotide with phosphorothioate linkage
  modified_base 6: mod_base = OTHER; note = Nucleotide with phosphorothioate linkage
  modified_base 7: mod_base = OTHER; note = Thymine with phosphorothioate linkage
  modified_base 8: mod_base = OTHER; note = Nucleotide with phosphorothioate linkage
  modified_base 9: mod_base = OTHER; note = Nucleotide with phosphorothioate linkage
  modified_base 10: mod_base = OTHER; note = Nucleotide with mesyl phosphoroamidate linkage
  modified_base 11: mod_base = OTHER; note = Nucleotide with phosphorothioate linkage
  modified_base 12: mod_base = OTHER; note = 5-methylcytosine with phosphorothioate linkage
  modified_base 13: mod_base = OTHER; note = Nucleotide with phosphorothioate linkage
  modified_base 14: mod_base = OTHER; note = Nucleotide with phosphorothioate linkage
  modified_base 15: mod_base = OTHER; note = Nucleotide with phosphorothioate linkage
  modified_base 16: mod_base = OTHER; note = 2'-O-methoxyethyl modified nucleotide with phosphorothioate linkage
  modified_base 17: mod_base = OTHER; note = 2'-O-methoxyethyl modified thymine with phosphorothioate linkage
  modified_base 18: mod_base = OTHER; note = 2'-O-methoxyethyl modified nucleotide with phosphorothioate linkage
  modified_base 19: mod_base = OTHER; note = 2'-O-methoxyethyl 5-methylcytosine with phosphorothioate linkage
  modified_base 20: mod_base = OTHER; note = 2'-O-methoxyethyl modified nucleotide
  misc_feature 1..5: note = RNA
  misc_feature 6..15: note = DNA
  misc_feature 16..20: note = RNA
cagaggtgaagcgaagtgca

SEQ ID NO: 627 - DNA, 20 bp, synthetic construct
  source 1..20: mol_type = other DNA
  modified_base 1: mod_base = OTHER; note = 2'-O-methoxyethyl 5-methylcytosine with phosphorothioate linkage
  modified_base 2: mod_base = OTHER; note = 2'-O-methoxyethyl modified nucleotide with phosphorothioate linkage
  modified_base 3: mod_base = OTHER; note = 2'-O-methoxyethyl modified nucleotide with phosphorothioate linkage
  modified_base 4: mod_base = OTHER; note = 2'-O-methoxyethyl modified nucleotide with phosphorothioate linkage
  modified_base 5: mod_base = OTHER; note = 2'-O-methoxyethyl modified nucleotide with phosphorothioate linkage
  modified_base 6: mod_base = OTHER; note = Nucleotide with phosphorothioate linkage
  modified_base 7: mod_base = OTHER; note = Thymine with phosphorothioate linkage
  modified_base 8: mod_base = OTHER; note = Nucleotide with phosphorothioate linkage
  modified_base 9: mod_base = OTHER; note = Nucleotide with phosphorothioate linkage
  modified_base 10: mod_base = OTHER; note = Nucleotide with phosphorothioate linkage
  modified_base 11: mod_base = OTHER; note = Nucleotide with mesyl phosphoroamidate linkage
  modified_base 12: mod_base = OTHER; note = 5-methylcytosine with phosphorothioate linkage
  modified_base 13: mod_base = OTHER; note = Nucleotide with phosphorothioate linkage
  modified_base 14: mod_base = OTHER; note = Nucleotide with phosphorothioate linkage
  modified_base 15: mod_base = OTHER; note = Nucleotide with phosphorothioate linkage
  modified_base 16: mod_base = OTHER; note = 2'-O-methoxyethyl modified nucleotide with phosphorothioate linkage
  modified_base 17: mod_base = OTHER; note = 2'-O-methoxyethyl modified thymine with phosphorothioate linkage
  modified_base 18: mod_base = OTHER; note = 2'-O-methoxyethyl modified nucleotide with phosphorothioate linkage
  modified_base 19: mod_base = OTHER; note = 2'-O-methoxyethyl 5-methylcytosine with phosphorothioate linkage
  modified_base 20: mod_base = OTHER; note = 2'-O-methoxyethyl modified nucleotide
  misc_feature 1..5: note = RNA
  misc_feature 6..15: note = DNA
  misc_feature 16..20: note = RNA
cagaggtgaagcgaagtgca

SEQ ID NO: 628 - DNA, 20 bp, synthetic construct
  source 1..20: mol_type = other DNA
  modified_base 1: mod_base = OTHER; note = 2'-O-methoxyethyl 5-methylcytosine with phosphorothioate linkage
  modified_base 2: mod_base = OTHER; note = 2'-O-methoxyethyl modified nucleotide with phosphorothioate linkage
  modified_base 3: mod_base = OTHER; note = 2'-O-methoxyethyl modified nucleotide with phosphorothioate linkage
  modified_base 4: mod_base = OTHER; note = 2'-O-methoxyethyl modified nucleotide with phosphorothioate linkage
  modified_base 5: mod_base = OTHER; note = 2'-O-methoxyethyl modified nucleotide with phosphorothioate linkage
  modified_base 6: mod_base = OTHER; note = Nucleotide with phosphorothioate linkage
  modified_base 7: mod_base = OTHER; note = Thymine with phosphorothioate linkage
  modified_base 8: mod_base = OTHER; note = Nucleotide with phosphorothioate linkage
  modified_base 9: mod_base = OTHER; note = Nucleotide with phosphorothioate linkage
  modified_base 10: mod_base = OTHER; note = Nucleotide with phosphorothioate linkage
  modified_base 11: mod_base = OTHER; note = Nucleotide with phosphorothioate linkage
  modified_base 12: mod_base = OTHER; note = 5-methylcytosine with mesyl phosphoroamidate linkage
  modified_base 13: mod_base = OTHER; note = Nucleotide with phosphorothioate linkage
  modified_base 14: mod_base = OTHER; note = Nucleotide with phosphorothioate linkage
  modified_base 15: mod_base = OTHER; note = Nucleotide with phosphorothioate linkage
  modified_base 16: mod_base = OTHER; note = 2'-O-methoxyethyl modified nucleotide with phosphorothioate linkage
  modified_base 17: mod_base = OTHER; note = 2'-O-methoxyethyl modified thymine with phosphorothioate linkage
  modified_base 18: mod_base = OTHER; note = 2'-O-methoxyethyl modified nucleotide with phosphorothioate linkage
  modified_base 19: mod_base = OTHER; note = 2'-O-methoxyethyl 5-methylcytosine with phosphorothioate linkage
  modified_base 20: mod_base = OTHER; note = 2'-O-methoxyethyl modified nucleotide
  misc_feature 1..5: note = RNA
  misc_feature 6..15: note = DNA
  misc_feature 16..20: note = RNA
cagaggtgaagcgaagtgca

SEQ ID NO: 629 - DNA, 20 bp, synthetic construct
  source 1..20: mol_type = other DNA
  modified_base 1: mod_base = OTHER; note = 2'-O-methoxyethyl 5-methylcytosine with phosphorothioate linkage
  modified_base 2: mod_base = OTHER; note = 2'-O-methoxyethyl modified nucleotide with phosphorothioate linkage
  modified_base 3: mod_base = OTHER; note = 2'-O-methoxyethyl modified nucleotide with phosphorothioate linkage
  modified_base 4: mod_base = OTHER; note = 2'-O-methoxyethyl modified nucleotide with phosphorothioate linkage
  modified_base 5: mod_base = OTHER; note = 2'-O-methoxyethyl modified nucleotide with phosphorothioate linkage
  modified_base 6: mod_base = OTHER; note = Nucleotide with phosphorothioate linkage
  modified_base 7: mod_base = OTHER; note = Thymine with phosphorothioate linkage
  modified_base 8: mod_base = OTHER; note = Nucleotide with phosphorothioate linkage
  modified_base 9: mod_base = OTHER; note = Nucleotide with phosphorothioate linkage
  modified_base 10: mod_base = OTHER; note = Nucleotide with phosphorothioate linkage
  modified_base 11: mod_base = OTHER; note = Nucleotide with phosphorothioate linkage
  modified_base 12: mod_base = OTHER; note = 5-methylcytosine with phosphorothioate linkage
  modified_base 13: mod_base = OTHER; note = Nucleotide with mesyl phosphoroamidate linkage
  modified_base 14: mod_base = OTHER; note = Nucleotide with phosphorothioate linkage
  modified_base 15: mod_base = OTHER; note = Nucleotide with phosphorothioate linkage
  modified_base 16: mod_base = OTHER; note = 2'-O-methoxyethyl modified nucleotide with phosphorothioate linkage
  modified_base 17: mod_base = OTHER; note = 2'-O-methoxyethyl modified thymine with phosphorothioate linkage
  modified_base 18: mod_base = OTHER; note = 2'-O-methoxyethyl modified nucleotide with phosphorothioate linkage
  modified_base 19: mod_base = OTHER; note = 2'-O-methoxyethyl 5-methylcytosine with phosphorothioate linkage
  modified_base 20: mod_base = OTHER; note = 2'-O-methoxyethyl modified nucleotide
  misc_feature 1..5: note = RNA
  misc_feature 6..15: note = DNA
  misc_feature 16..20: note = RNA
cagaggtgaagcgaagtgca

SEQ ID NO: 630 - DNA, 20 bp, synthetic construct
  source 1..20: mol_type = other DNA
  modified_base 1: mod_base = OTHER; note = 2'-O-methoxyethyl 5-methylcytosine with phosphorothioate linkage
  modified_base 2: mod_base = OTHER; note = 2'-O-methoxyethyl modified nucleotide with phosphorothioate linkage
  modified_base 3: mod_base = OTHER; note = 2'-O-methoxyethyl modified nucleotide with phosphorothioate linkage
  modified_base 4: mod_base = OTHER; note = 2'-O-methoxyethyl modified nucleotide with phosphorothioate linkage
  modified_base 5: mod_base = OTHER; note = 2'-O-methoxyethyl modified nucleotide with phosphorothioate linkage
  modified_base 6: mod_base = OTHER; note = Nucleotide with phosphorothioate linkage
  modified_base 7: mod_base = OTHER; note = Thymine with phosphorothioate linkage
  modified_base 8: mod_base = OTHER; note = Nucleotide with phosphorothioate linkage
  modified_base 9: mod_base = OTHER; note = Nucleotide with phosphorothioate linkage
  modified_base 10: mod_base = OTHER; note = Nucleotide with phosphorothioate linkage
  modified_base 11: mod_base = OTHER; note = Nucleotide with phosphorothioate linkage
  modified_base 12: mod_base = OTHER; note = 5-methylcytosine with phosphorothioate linkage
  modified_base 13: mod_base = OTHER; note = Nucleotide with phosphorothioate linkage
  modified_base 14: mod_base = OTHER; note = Nucleotide with mesyl phosphoroamidate linkage
  modified_base 15: mod_base = OTHER; note = Nucleotide with phosphorothioate linkage
  modified_base 16: mod_base = OTHER; note = 2'-O-methoxyethyl modified nucleotide with phosphorothioate linkage
  modified_base 17: mod_base = OTHER; note = 2'-O-methoxyethyl modified thymine with phosphorothioate linkage
  modified_base 18: mod_base = OTHER; note = 2'-O-methoxyethyl modified nucleotide with phosphorothioate linkage
  modified_base 19: mod_base = OTHER; note = 2'-O-methoxyethyl 5-methylcytosine with phosphorothioate linkage
  modified_base 20: mod_base = OTHER; note = 2'-O-methoxyethyl modified nucleotide
  misc_feature 1..5: note = RNA
  misc_feature 6..15: note = DNA
  misc_feature 16..20: note = RNA
cagaggtgaagcgaagtgca

SEQ ID NO: 631 - DNA, 20 bp, synthetic construct
  source 1..20: mol_type = other DNA
  modified_base 1: mod_base = OTHER; note = 2'-O-methoxyethyl 5-methylcytosine with phosphorothioate linkage
  modified_base 2: mod_base = OTHER; note = 2'-O-methoxyethyl modified nucleotide with phosphorothioate linkage
  modified_base 3: mod_base = OTHER; note = 2'-O-methoxyethyl modified nucleotide with phosphorothioate linkage
  modified_base 4: mod_base = OTHER; note = 2'-O-methoxyethyl modified nucleotide with phosphorothioate linkage
  modified_base 5: mod_base = OTHER; note = 2'-O-methoxyethyl modified nucleotide with mesyl phosphoroamidate linkage
  modified_base 6: mod_base = OTHER; note = Nucleotide with phosphorothioate linkage
  modified_base 7: mod_base = OTHER; note = Thymine with phosphorothioate linkage
  modified_base 8: mod_base = OTHER; note = Nucleotide with phosphorothioate linkage
  modified_base 9: mod_base = OTHER; note = Nucleotide with phosphorothioate linkage
  modified_base 10: mod_base = OTHER; note = Nucleotide with phosphorothioate linkage
  modified_base 11: mod_base = OTHER; note = Nucleotide with phosphorothioate linkage
  modified_base 12: mod_base = OTHER; note = 5-methylcytosine with phosphorothioate linkage
  modified_base 13: mod_base = OTHER; note = Nucleotide with phosphorothioate linkage
  modified_base 14: mod_base = OTHER; note = Nucleotide with phosphorothioate linkage
  modified_base 15: mod_base = OTHER; note = Nucleotide with phosphorothioate linkage
  modified_base 16: mod_base = OTHER; note = 2'-O-methyl modified nucleotide with phosphorothioate linkage
  modified_base 17: mod_base = OTHER; note = 2'-O-methoxyethyl modified thymine with phosphorothioate linkage
  modified_base 18: mod_base = OTHER; note = 2'-O-methyl modified nucleotide with phosphorothioate linkage
  modified_base 19: mod_base = OTHER; note = 2'-O-methoxyethyl 5-methylcytosine with phosphorothioate linkage
  modified_base 20: mod_base = OTHER; note = 2'-O-methyl modified nucleotide
  misc_feature 1..5: note = RNA
  misc_feature 6..15: note = DNA
  misc_feature 16..20: note = RNA
cagaggtgaagcgaagtgca

SEQ ID NO: 632 - DNA, 20 bp, synthetic construct
  source 1..20: mol_type = other DNA
  modified_base 1: mod_base = OTHER; note = 2'-O-methoxyethyl 5-methylcytosine with phosphorothioate linkage
  modified_base 2: mod_base = OTHER; note = 2'-O-methoxyethyl modified nucleotide with phosphorothioate linkage
  modified_base 3: mod_base = OTHER; note = 2'-O-methoxyethyl modified nucleotide with phosphorothioate linkage
  modified_base 4: mod_base = OTHER; note = 2'-O-methoxyethyl modified nucleotide with phosphorothioate linkage
  modified_base 5: mod_base = OTHER; note = 2'-O-methoxyethyl modified nucleotide with phosphorothioate linkage
  modified_base 6: mod_base = OTHER; note = Nucleotide with mesyl phosphoroamidate linkage
  modified_base 7: mod_base = OTHER; note = Thymine with phosphorothioate linkage
  modified_base 8: mod_base = OTHER; note = Nucleotide with phosphorothioate linkage
  modified_base 9: mod_base = OTHER; note = Nucleotide with phosphorothioate linkage
  modified_base 10: mod_base = OTHER; note = Nucleotide with phosphorothioate linkage
  modified_base 11: mod_base = OTHER; note = Nucleotide with phosphorothioate linkage
  modified_base 12: mod_base = OTHER; note = 5-methylcytosine with phosphorothioate linkage
  modified_base 13: mod_base = OTHER; note = Nucleotide with phosphorothioate linkage
  modified_base 14: mod_base = OTHER; note = Nucleotide with phosphorothioate linkage
  modified_base 15: mod_base = OTHER; note = Nucleotide with phosphorothioate linkage
  modified_base 16: mod_base = OTHER; note = 2'-O-methyl modified nucleotide with phosphorothioate linkage
  modified_base 17: mod_base = OTHER; note = 2'-O-methoxyethyl modified thymine with phosphorothioate linkage
  modified_base 18: mod_base = OTHER; note = 2'-O-methyl modified nucleotide with phosphorothioate linkage
  modified_base 19: mod_base = OTHER; note = 2'-O-methoxyethyl 5-methylcytosine with phosphorothioate linkage
  modified_base 20: mod_base = OTHER; note = 2'-O-methyl modified nucleotide
  misc_feature 1..5: note = RNA
  misc_feature 6..15: note = DNA
  misc_feature 16..20: note = RNA
cagaggtgaagcgaagtgca

SEQ ID NO: 633 - DNA, 20 bp, synthetic construct
  source 1..20: mol_type = other DNA
  modified_base 1: mod_base = OTHER; note = 2'-O-methoxyethyl 5-methylcytosine with phosphorothioate linkage
  modified_base 2: mod_base = OTHER; note = 2'-O-methoxyethyl modified nucleotide with phosphorothioate linkage
  modified_base 3: mod_base = OTHER; note = 2'-O-methoxyethyl modified nucleotide with phosphorothioate linkage
  modified_base 4: mod_base = OTHER; note = 2'-O-methoxyethyl modified nucleotide with phosphorothioate linkage
  modified_base 5: mod_base = OTHER; note = 2'-O-methoxyethyl modified nucleotide with phosphorothioate linkage
  modified_base 6: mod_base = OTHER; note = Nucleotide with phosphorothioate linkage
  modified_base 7: mod_base = OTHER; note = Thymine with mesyl phosphoroamidate linkage
  modified_base 8: mod_base = OTHER; note = Nucleotide with phosphorothioate linkage
  modified_base 9: mod_base = OTHER; note = Nucleotide with phosphorothioate linkage
  modified_base 10: mod_base = OTHER; note = Nucleotide with phosphorothioate linkage
  modified_base 11: mod_base = OTHER; note = Nucleotide with phosphorothioate linkage
  modified_base 12: mod_base = OTHER; note = 5-methylcytosine with phosphorothioate linkage
  modified_base 13: mod_base = OTHER; note = Nucleotide with phosphorothioate linkage
  modified_base 14: mod_base = OTHER; note = Nucleotide with phosphorothioate linkage
  modified_base 15: mod_base = OTHER; note = Nucleotide with phosphorothioate linkage
  modified_base 16: mod_base = OTHER; note = 2'-O-methyl modified nucleotide with phosphorothioate linkage
  modified_base 17: mod_base = OTHER; note = 2'-O-methoxyethyl modified thymine with phosphorothioate linkage
  modified_base 18: mod_base = OTHER; note = 2'-O-methyl modified nucleotide with phosphorothioate linkage
  modified_base 19: mod_base = OTHER; note = 2'-O-methoxyethyl 5-methylcytosine with phosphorothioate linkage
  modified_base 20: mod_base = OTHER; note = 2'-O-methyl modified nucleotide
  misc_feature 1..5: note = RNA
  misc_feature 6..15: note = DNA
  misc_feature 16..20: note = RNA
cagaggtgaagcgaagtgca

SEQ ID NO: 634 - DNA, 20 bp, synthetic construct
  source 1..20: mol_type = other DNA
  modified_base 1: mod_base = OTHER; note = 2'-O-methoxyethyl 5-methylcytosine with phosphorothioate linkage
  modified_base 2: mod_base = OTHER; note = 2'-O-methoxyethyl modified nucleotide with phosphorothioate linkage
  modified_base 3: mod_base = OTHER; note = 2'-O-methoxyethyl modified nucleotide with phosphorothioate linkage
  modified_base 4: mod_base = OTHER; note = 2'-O-methoxyethyl modified nucleotide with phosphorothioate linkage
  modified_base 5: mod_base = OTHER; note = 2'-O-methoxyethyl modified nucleotide with phosphorothioate linkage
  modified_base 6: mod_base = OTHER; note = Nucleotide with phosphorothioate linkage
  modified_base 7: mod_base = OTHER; note = Thymine with phosphorothioate linkage
  modified_base 8: mod_base = OTHER; note = Nucleotide with mesyl phosphoroamidate linkage
  modified_base 9: mod_base = OTHER; note = Nucleotide with phosphorothioate linkage
  modified_base 10: mod_base = OTHER; note = Nucleotide with phosphorothioate linkage
  modified_base 11: mod_base = OTHER; note = Nucleotide with phosphorothioate linkage
  modified_base 12: mod_base = OTHER; note = 5-methylcytosine with phosphorothioate linkage
  modified_base 13: mod_base = OTHER; note = Nucleotide with phosphorothioate linkage
  modified_base 14: mod_base = OTHER; note = Nucleotide with phosphorothioate linkage
  modified_base 15: mod_base = OTHER; note = Nucleotide with phosphorothioate linkage
  modified_base 16: mod_base = OTHER; note = 2'-O-methyl modified nucleotide with phosphorothioate linkage
  modified_base 17: mod_base = OTHER; note = 2'-O-methoxyethyl modified thymine with phosphorothioate linkage
  modified_base 18: mod_base = OTHER; note = 2'-O-methyl modified nucleotide with phosphorothioate linkage
  modified_base 19: mod_base = OTHER; note = 2'-O-methoxyethyl 5-methylcytosine with phosphorothioate linkage
  modified_base 20: mod_base = OTHER; note = 2'-O-methyl modified nucleotide
  misc_feature 1..5: note = RNA
  misc_feature 6..15: note = DNA
  misc_feature 16..20: note = RNA
cagaggtgaagcgaagtgca

SEQ ID NO: 635 - DNA, 20 bp, synthetic construct
  source 1..20: mol_type = other DNA
  modified_base 1: mod_base = OTHER; note = 2'-O-methoxyethyl 5-methylcytosine with phosphorothioate linkage
  modified_base 2: mod_base = OTHER; note = 2'-O-methoxyethyl modified nucleotide with phosphorothioate linkage
  modified_base 3: mod_base = OTHER; note = 2'-O-methoxyethyl modified nucleotide with phosphorothioate linkage
  modified_base 4: mod_base = OTHER; note = 2'-O-methoxyethyl modified nucleotide with phosphorothioate linkage
  modified_base 5: mod_base = OTHER; note = 2'-O-methoxyethyl modified nucleotide with phosphorothioate linkage
  modified_base 6: mod_base = OTHER; note = Nucleotide with phosphorothioate linkage
  modified_base 7: mod_base = OTHER; note = Thymine with phosphorothioate linkage
  modified_base 8: mod_base = OTHER; note = Nucleotide with phosphorothioate linkage
  modified_base 9: mod_base = OTHER; note = Nucleotide with mesyl phosphoroamidate linkage
  modified_base 10: mod_base = OTHER; note = Nucleotide with phosphorothioate linkage
  modified_base 11: mod_base = OTHER; note = Nucleotide with phosphorothioate linkage
  modified_base 12: mod_base = OTHER; note = 5-methylcytosine with phosphorothioate linkage
  modified_base 13: mod_base = OTHER; note = Nucleotide with phosphorothioate linkage
  modified_base 14: mod_base = OTHER; note = Nucleotide with phosphorothioate linkage
  modified_base 15: mod_base = OTHER; note = Nucleotide with phosphorothioate linkage
  modified_base 16: mod_base = OTHER; note = 2'-O-methyl modified nucleotide with phosphorothioate linkage
  modified_base 17: mod_base = OTHER; note = 2'-O-methoxyethyl modified thymine with phosphorothioate linkage
  modified_base 18: mod_base = OTHER; note = 2'-O-methyl modified nucleotide with phosphorothioate linkage
  modified_base 19: mod_base = OTHER; note = 2'-O-methoxyethyl 5-methylcytosine with phosphorothioate linkage
  modified_base 20: mod_base = OTHER; note = 2'-O-methyl modified nucleotide
  misc_feature 1..5: note = RNA
  misc_feature 6..15: note = DNA
  misc_feature 16..20: note = RNA
cagaggtgaagcgaagtgca

SEQ ID NO: 636 - DNA, 20 bp, synthetic construct
  source 1..20: mol_type = other DNA
  modified_base 1: mod_base = OTHER; note = 2'-O-methoxyethyl 5-methylcytosine with phosphorothioate linkage
  modified_base 2: mod_base = OTHER; note = 2'-O-methoxyethyl modified nucleotide with phosphorothioate linkage
  modified_base 3: mod_base = OTHER; note = 2'-O-methoxyethyl modified nucleotide with phosphorothioate linkage
  modified_base 4: mod_base = OTHER; note = 2'-O-methoxyethyl modified nucleotide with phosphorothioate linkage
  modified_base 5: mod_base = OTHER; note = 2'-O-methoxyethyl modified nucleotide with phosphorothioate linkage
  modified_base 6: mod_base = OTHER; note = Nucleotide with phosphorothioate linkage
  modified_base 7: mod_base = OTHER; note = Thymine with phosphorothioate linkage
  modified_base 8: mod_base = OTHER; note = Nucleotide with phosphorothioate linkage
  modified_base 9: mod_base = OTHER; note = Nucleotide with phosphorothioate linkage
  modified_base 10: mod_base = OTHER; note = Nucleotide with mesyl phosphoroamidate linkage
  modified_base 11: mod_base = OTHER; note = Nucleotide with phosphorothioate linkage
  modified_base 12: mod_base = OTHER; note = 5-methylcytosine with phosphorothioate linkage
  modified_base 13: mod_base = OTHER; note = Nucleotide with phosphorothioate linkage
  modified_base 14: mod_base = OTHER; note = Nucleotide with phosphorothioate linkage
  modified_base 15: mod_base = OTHER; note = Nucleotide with phosphorothioate linkage
  modified_base 16: mod_base = OTHER; note = 2'-O-methyl modified nucleotide with phosphorothioate linkage
  modified_base 17: mod_base = OTHER; note = 2'-O-methoxyethyl modified thymine with phosphorothioate linkage
  modified_base 18: mod_base = OTHER; note = 2'-O-methyl modified nucleotide with phosphorothioate linkage
  modified_base 19: mod_base = OTHER; note = 2'-O-methoxyethyl 5-methylcytosine with phosphorothioate linkage
  modified_base 20: mod_base = OTHER; note = 2'-O-methyl modified nucleotide
  misc_feature 1..5: note = RNA
  misc_feature 6..15: note = DNA
  misc_feature 16..20: note = RNA
cagaggtgaagcgaagtgca

SEQ ID NO: 637 - DNA, 20 bp, synthetic construct
  source 1..20: mol_type = other DNA
  modified_base 1: mod_base = OTHER; note = 2'-O-methoxyethyl 5-methylcytosine with phosphorothioate linkage
  modified_base 2: mod_base = OTHER; note = 2'-O-methoxyethyl modified nucleotide with phosphorothioate linkage
  modified_base 3: mod_base = OTHER; note = 2'-O-methoxyethyl modified nucleotide with phosphorothioate linkage
  modified_base 4: mod_base = OTHER; note = 2'-O-methoxyethyl modified nucleotide with phosphorothioate linkage
  modified_base 5: mod_base = OTHER; note = 2'-O-methoxyethyl modified nucleotide with phosphorothioate linkage
  modified_base 6: mod_base = OTHER; note = Nucleotide with phosphorothioate linkage
  modified_base 7: mod_base = OTHER; note = Thymine with phosphorothioate linkage
  modified_base 8: mod_base = OTHER; note = Nucleotide with phosphorothioate linkage
  modified_base 9: mod_base = OTHER; note = Nucleotide with phosphorothioate linkage
  modified_base 10: mod_base = OTHER; note = Nucleotide with phosphorothioate linkage
  modified_base 11: mod_base = OTHER; note = Nucleotide with mesyl phosphoroamidate linkage
  modified_base 12: mod_base = OTHER; note = 5-methylcytosine with phosphorothioate linkage
  modified_base 13: mod_base = OTHER; note = Nucleotide with phosphorothioate linkage
  modified_base 14: mod_base = OTHER; note = Nucleotide with phosphorothioate linkage
  modified_base 15: mod_base = OTHER; note = Nucleotide with phosphorothioate linkage
  modified_base 16: mod_base = OTHER; note = 2'-O-methyl modified nucleotide with phosphorothioate linkage
  modified_base 17: mod_base = OTHER; note = 2'-O-methoxyethyl modified thymine with phosphorothioate linkage
  modified_base 18: mod_base = OTHER; note = 2'-O-methyl modified nucleotide with phosphorothioate linkage
  modified_base 19: mod_base = OTHER; note = 2'-O-methoxyethyl 5-methylcytosine with phosphorothioate linkage
  modified_base 20: mod_base = OTHER; note = 2'-O-methyl modified nucleotide
  misc_feature 1..5: note = RNA
  misc_feature 6..15: note = DNA
  misc_feature 16..20: note = RNA
cagaggtgaagcgaagtgca

SEQ ID NO: 638 - DNA, 20 bp, synthetic construct
  source 1..20: mol_type = other DNA
  modified_base 1: mod_base = OTHER; note = 2'-O-methoxyethyl 5-methylcytosine with phosphorothioate linkage
  modified_base 2: mod_base = OTHER; note = 2'-O-methoxyethyl modified nucleotide with phosphorothioate linkage
  modified_base 3: mod_base = OTHER; note = 2'-O-methoxyethyl modified nucleotide with phosphorothioate linkage
  modified_base 4: mod_base = OTHER; note = 2'-O-methoxyethyl modified nucleotide with phosphorothioate linkage
  modified_base 5: mod_base = OTHER; note = 2'-O-methoxyethyl modified nucleotide with phosphorothioate linkage
  modified_base 6: mod_base = OTHER; note = Nucleotide with phosphorothioate linkage
  modified_base 7: mod_base = OTHER; note = Thymine with phosphorothioate linkage
  modified_base 8: mod_base = OTHER; note = Nucleotide with phosphorothioate linkage
  modified_base 9: mod_base = OTHER; note = Nucleotide with phosphorothioate linkage
  modified_base 10: mod_base = OTHER; note = Nucleotide with phosphorothioate linkage
  modified_base 11: mod_base = OTHER; note = Nucleotide with phosphorothioate linkage
  modified_base 12: mod_base = OTHER; note = 5-methylcytosine with mesyl phosphoroamidate linkage
  modified_base 13: mod_base = OTHER; note = Nucleotide with phosphorothioate linkage
  modified_base 14: mod_base = OTHER; note = Nucleotide with phosphorothioate linkage
  modified_base 15: mod_base = OTHER; note = Nucleotide with phosphorothioate linkage
  modified_base 16: mod_base = OTHER; note = 2'-O-methyl modified nucleotide with phosphorothioate linkage
  modified_base 17: mod_base = OTHER; note = 2'-O-methoxyethyl modified thymine with phosphorothioate linkage
  modified_base 18: mod_base = OTHER; note = 2'-O-methyl modified nucleotide with phosphorothioate linkage
  modified_base 19: mod_base = OTHER; note = 2'-O-methoxyethyl 5-methylcytosine with phosphorothioate linkage
  modified_base 20: mod_base = OTHER; note = 2'-O-methyl modified nucleotide
  misc_feature 1..5: note = RNA
  misc_feature 6..15: note = DNA
  misc_feature 16..20: note = RNA
cagaggtgaagcgaagtgca

SEQ ID NO: 639 - DNA, 20 bp, synthetic construct
  source 1..20: mol_type = other DNA
  modified_base 1: mod_base = OTHER; note = 2'-O-methoxyethyl 5-methylcytosine with phosphorothioate linkage
  modified_base 2: mod_base = OTHER; note = 2'-O-methoxyethyl modified nucleotide with phosphorothioate linkage
  modified_base 3: mod_base = OTHER; note = 2'-O-methoxyethyl modified nucleotide with phosphorothioate linkage
  modified_base 4: mod_base = OTHER; note = 2'-O-methoxyethyl modified nucleotide with phosphorothioate linkage
  modified_base 5: mod_base = OTHER; note = 2'-O-methoxyethyl modified nucleotide with phosphorothioate linkage
  modified_base 6: mod_base = OTHER; note = Nucleotide with phosphorothioate linkage
  modified_base 7: mod_base = OTHER; note = Thymine with phosphorothioate linkage
  modified_base 8: mod_base = OTHER; note = Nucleotide with phosphorothioate linkage
  modified_base 9: mod_base = OTHER; note = Nucleotide with phosphorothioate linkage
  modified_base 10: mod_base = OTHER; note = Nucleotide with phosphorothioate linkage
  modified_base 11: mod_base = OTHER; note = Nucleotide with phosphorothioate linkage
  modified_base 12: mod_base = OTHER; note = 5-methylcytosine with phosphorothioate linkage
  modified_base 13: mod_base = OTHER; note = Nucleotide with mesyl phosphoroamidate linkage
  modified_base 14: mod_base = OTHER; note = Nucleotide with phosphorothioate linkage
  modified_base 15: mod_base = OTHER; note = Nucleotide with phosphorothioate linkage
  modified_base 16: mod_base = OTHER; note = 2'-O-methyl modified nucleotide with phosphorothioate linkage
  modified_base 17: mod_base = OTHER; note = 2'-O-methoxyethyl modified thymine with phosphorothioate linkage
  modified_base 18: mod_base = OTHER; note = 2'-O-methyl modified nucleotide with phosphorothioate linkage
  modified_base 19: mod_base = OTHER; note = 2'-O-methoxyethyl 5-methylcytosine with phosphorothioate linkage
  modified_base 20: mod_base = OTHER; note = 2'-O-methyl modified nucleotide
  misc_feature 1..5: note = RNA
  misc_feature 6..15: note = DNA
  misc_feature 16..20: note = RNA
cagaggtgaagcgaagtgca

SEQ ID NO: 640 - DNA, 20 bp, synthetic construct
  source 1..20: mol_type = other DNA
  modified_base 1: mod_base = OTHER; note = 2'-O-methoxyethyl 5-methylcytosine with phosphorothioate linkage
  modified_base 2: mod_base = OTHER; note = 2'-O-methoxyethyl modified nucleotide with phosphorothioate linkage
  modified_base 3: mod_base = OTHER; note = 2'-O-methoxyethyl modified nucleotide with phosphorothioate linkage
  modified_base 4: mod_base = OTHER; note = 2'-O-methoxyethyl modified nucleotide with phosphorothioate linkage
  modified_base 5: mod_base = OTHER; note = 2'-O-methoxyethyl modified nucleotide with phosphorothioate linkage
  modified_base 6: mod_base = OTHER; note = Nucleotide with phosphorothioate linkage
  modified_base 7: mod_base = OTHER; note = Thymine with phosphorothioate linkage
  modified_base 8: mod_base = OTHER; note = Nucleotide with phosphorothioate linkage
  modified_base 9: mod_base = OTHER; note = Nucleotide with phosphorothioate linkage
  modified_base 10: mod_base = OTHER; note = Nucleotide with phosphorothioate linkage
  modified_base 11: mod_base = OTHER; note = Nucleotide with phosphorothioate linkage
  modified_base 12: mod_base = OTHER; note = 5-methylcytosine with phosphorothioate linkage
  modified_base 13: mod_base = OTHER; note = Nucleotide with phosphorothioate linkage
  modified_base 14: mod_base = OTHER; note = Nucleotide with mesyl phosphoroamidate linkage
  modified_base 15: mod_base = OTHER; note = Nucleotide with phosphorothioate linkage
  modified_base 16: mod_base = OTHER; note = 2'-O-methyl modified nucleotide with phosphorothioate linkage
  modified_base 17: mod_base = OTHER; note = 2'-O-methoxyethyl modified thymine with phosphorothioate linkage
  modified_base 18: mod_base = OTHER; note = 2'-O-methyl modified nucleotide with phosphorothioate linkage
  modified_base 19: mod_base = OTHER; note = 2'-O-methoxyethyl 5-methylcytosine with phosphorothioate linkage
  modified_base 20: mod_base = OTHER; note = 2'-O-methyl modified nucleotide
  misc_feature 1..5: note = RNA
  misc_feature 6..15: note = DNA
  misc_feature 16..20: note = RNA
cagaggtgaagcgaagtgca

SEQ ID NO: 641 - DNA, 20 bp, synthetic construct
  source 1..20: mol_type = other DNA
  modified_base 1: mod_base = OTHER; note = 2'-O-methoxyethyl 5-methylcytosine with phosphorothioate linkage
  modified_base 2: mod_base = OTHER; note = 2'-O-methoxyethyl modified nucleotide with phosphorothioate linkage
  modified_base 3: mod_base = OTHER; note = 2'-O-methoxyethyl modified nucleotide with phosphorothioate linkage
  modified_base 4: mod_base = OTHER; note = 2'-O-methoxyethyl modified nucleotide with phosphorothioate linkage
  modified_base 5: mod_base = OTHER; note = 2'-O-methoxyethyl modified nucleotide with phosphorothioate linkage
  modified_base 6: mod_base = OTHER; note = 2'-O-methoxyethyl modified nucleotide with phosphorothioate linkage
  modified_base 7: mod_base = OTHER; note = Thymine with phosphorothioate linkage
  modified_base 8: mod_base = OTHER; note = Nucleotide with phosphorothioate linkage
  modified_base 9: mod_base = OTHER; note = Nucleotide with phosphorothioate linkage
  modified_base 10: mod_base = OTHER; note = Nucleotide with phosphorothioate linkage
  modified_base 11: mod_base = OTHER; note = Nucleotide with phosphorothioate linkage
  modified_base 12: mod_base = OTHER; note = 5-methylcytosine with phosphorothioate linkage
  modified_base 13: mod_base = OTHER; note = Nucleotide with phosphorothioate linkage
  modified_base 14: mod_base = OTHER; note = Nucleotide with phosphorothioate linkage
  modified_base 15: mod_base = OTHER; note = Nucleotide with phosphorothioate linkage
  modified_base 16: mod_base = OTHER; note = 2'-O-methoxyethyl modified nucleotide with phosphorothioate linkage
  modified_base 17: mod_base = OTHER; note = 2'-O-methoxyethyl modified thymine with phosphorothioate linkage
  modified_base 18: mod_base = OTHER; note = 2'-O-methoxyethyl modified nucleotide with phosphorothioate linkage
  modified_base 19: mod_base = OTHER; note = 2'-O-methoxyethyl 5-methylcytosine with phosphorothioate linkage
  modified_base 20: mod_base = OTHER; note = 2'-O-methoxyethyl modified nucleotide
  misc_feature 1..6: note = RNA
  misc_feature 7..15: note = DNA
  misc_feature 16..20: note = RNA
cagaggtgaagcgaagtgca

SEQ ID NO: 642 - DNA, 20 bp, synthetic construct
  source 1..20: mol_type = other DNA
  modified_base 1: mod_base = OTHER; note = 2'-O-methoxyethyl 5-methylcytosine with phosphorothioate linkage
  modified_base 2: mod_base = OTHER; note = 2'-O-methoxyethyl modified nucleotide with phosphorothioate linkage
  modified_base 3: mod_base = OTHER; note = 2'-O-methoxyethyl modified nucleotide with phosphorothioate linkage
  modified_base 4: mod_base = OTHER; note = 2'-O-methoxyethyl modified nucleotide with phosphorothioate linkage
  modified_base 5: mod_base = OTHER; note = 2'-O-methoxyethyl modified nucleotide with phosphorothioate linkage
  modified_base 6: mod_base = OTHER; note = Nucleotide with phosphorothioate linkage
  modified_base 7: mod_base = OTHER; note = Thymine with phosphorothioate linkage
  modified_base 8: mod_base = OTHER; note = Nucleotide with phosphorothioate linkage
  modified_base 9: mod_base = OTHER; note = Nucleotide with phosphorothioate linkage
  modified_base 10: mod_base = OTHER; note = Nucleotide with phosphorothioate linkage
  modified_base 11: mod_base = OTHER; note = Nucleotide with phosphorothioate linkage
  modified_base 12: mod_base = OTHER; note = 5-methylcytosine with phosphorothioate linkage
  modified_base 13: mod_base = OTHER; note = Nucleotide with phosphorothioate linkage
  modified_base 14: mod_base = OTHER; note = Nucleotide with phosphorothioate linkage
  modified_base 15: mod_base = OTHER; note = 2'-O-methoxyethyl modified nucleotide with phosphorothioate linkage
  modified_base 16: mod_base = OTHER; note = 2'-O-methoxyethyl modified nucleotide with phosphorothioate linkage
  modified_base 17: mod_base = OTHER; note = 2'-O-methoxyethyl modified thymine with phosphorothioate linkage
  modified_base 18: mod_base = OTHER; note = 2'-O-methoxyethyl modified nucleotide with phosphorothioate linkage
  modified_base 19: mod_base = OTHER; note = 2'-O-methoxyethyl 5-methylcytosine with phosphorothioate linkage
  modified_base 20: mod_base = OTHER; note = 2'-O-methoxyethyl modified nucleotide
  misc_feature 1..5: note = RNA
  misc_feature 6..14: note = DNA
  misc_feature 15..20: note = RNA
cagaggtgaagcgaagtgca

SEQ ID NO: 643 - DNA, 20 bp, synthetic construct
  source 1..20: mol_type = other DNA
  modified_base 1: mod_base = OTHER; note = 2'-O-methoxyethyl 5-methylcytosine with phosphorothioate linkage
  modified_base 2: mod_base = OTHER; note = 2'-O-methoxyethyl modified nucleotide with phosphorothioate linkage
  modified_base 3: mod_base = OTHER; note = 2'-O-methoxyethyl modified nucleotide with phosphorothioate linkage
  modified_base 4: mod_base = OTHER; note = 2'-O-methoxyethyl modified nucleotide with phosphorothioate linkage
  modified_base 5: mod_base = OTHER; note = Nucleotide with phosphorothioate linkage
  modified_base 6: mod_base = OTHER; note = Nucleotide with phosphorothioate linkage
  modified_base 7: mod_base = OTHER; note = Thymine with phosphorothioate linkage
  modified_base 8: mod_base = OTHER; note = Nucleotide with phosphorothioate linkage
  modified_base 9: mod_base = OTHER; note = Nucleotide with phosphorothioate linkage
  modified_base 10: mod_base = OTHER; note = Nucleotide with phosphorothioate linkage
  modified_base 11: mod_base = OTHER; note = Nucleotide with phosphorothioate linkage
  modified_base 12: mod_base = OTHER; note = 5-methylcytosine with phosphorothioate linkage
  modified_base 13: mod_base = OTHER; note = Nucleotide with phosphorothioate linkage
  modified_base 14: mod_base = OTHER; note = 2'-O-methoxyethyl modified nucleotide with phosphorothioate linkage
  modified_base 15: mod_base = OTHER; note = 2'-O-methoxyethyl modified nucleotide with phosphorothioate linkage
  modified_base 16: mod_base = OTHER; note = 2'-O-methoxyethyl modified nucleotide with phosphorothioate linkage
  modified_base 17: mod_base = OTHER; note = 2'-O-methoxyethyl modified thymine with phosphorothioate linkage
  modified_base 18: mod_base = OTHER; note = 2'-O-methoxyethyl modified nucleotide with phosphorothioate linkage
  modified_base 19: mod_base = OTHER; note = 2'-O-methoxyethyl 5-methylcytosine with phosphorothioate linkage
  modified_base 20: mod_base = OTHER; note = 2'-O-methoxyethyl modified nucleotide
  misc_feature 1..4: note = RNA
  misc_feature 5..13: note = DNA
  misc_feature 14..20: note = RNA
cagaggtgaagcgaagtgca

SEQ ID NO: 644 - DNA, 20 bp, synthetic construct
  source 1..20: mol_type = other DNA
  modified_base 1: mod_base = OTHER; note = 2'-O-methoxyethyl 5-methylcytosine with phosphorothioate linkage
  modified_base 2: mod_base = OTHER; note = 2'-O-methoxyethyl modified nucleotide with phosphorothioate linkage
  modified_base 3: mod_base = OTHER; note = 2'-O-methoxyethyl modified nucleotide with phosphorothioate linkage
  modified_base 4: mod_base = OTHER; note = 2'-O-methoxyethyl modified nucleotide with phosphorothioate linkage
  modified_base 5: mod_base = OTHER; note = 2'-O-methoxyethyl modified nucleotide with phosphorothioate linkage
  modified_base 6: mod_base = OTHER; note = 2'-O-methoxyethyl modified nucleotide with phosphorothioate linkage
  modified_base 7: mod_base = OTHER; note = Thymine with phosphorothioate linkage
  modified_base 8: mod_base = OTHER; note = Nucleotide with phosphorothioate linkage
  modified_base 9: mod_base = OTHER; note = Nucleotide with phosphorothioate linkage
  modified_base 10: mod_base = OTHER; note = Nucleotide with phosphorothioate linkage
  modified_base 11: mod_base = OTHER; note = Nucleotide with phosphorothioate linkage
  modified_base 12: mod_base = OTHER; note = 5-methylcytosine with phosphorothioate linkage
  modified_base 13: mod_base = OTHER; note = Nucleotide with phosphorothioate linkage
  modified_base 14: mod_base = OTHER; note = Nucleotide with phosphorothioate linkage
  modified_base 15: mod_base = OTHER; note = Nucleotide with phosphorothioate linkage
  modified_base 16: mod_base = OTHER; note = Nucleotide with phosphorothioate linkage
  modified_base 17: mod_base = OTHER; note = 2'-O-methoxyethyl modified thymine with phosphorothioate linkage
  modified_base 18: mod_base = OTHER; note = 2'-O-methoxyethyl modified nucleotide with phosphorothioate linkage
  modified_base 19: mod_base = OTHER; note = 2'-O-methoxyethyl 5-methylcytosine with phosphorothioate linkage
  modified_base 20: mod_base = OTHER; note = 2'-O-methoxyethyl modified nucleotide
  misc_feature 1..6: note = RNA
  misc_feature 7..16: note = DNA
  misc_feature 17..20: note = RNA
cagaggtgaagcgaagtgca

SEQ ID NO: 645 - DNA, 20 bp, synthetic construct
  source 1..20: mol_type = other DNA
  modified_base 1: mod_base = OTHER; note = 2'-O-methoxyethyl 5-methylcytosine with phosphorothioate linkage
  modified_base 2: mod_base = OTHER; note = 2'-O-methoxyethyl modified nucleotide with phosphorothioate linkage
  modified_base 3: mod_base = OTHER; note = 2'-O-methoxyethyl modified nucleotide with phosphorothioate linkage
  modified_base 4: mod_base = OTHER; note = 2'-O-methoxyethyl modified nucleotide with phosphorothioate linkage
  modified_base 5: mod_base = OTHER; note = Nucleotide with phosphorothioate linkage
  modified_base 6: mod_base = OTHER; note = Nucleotide with phosphorothioate linkage
  modified_base 7: mod_base = OTHER; note = Thymine with phosphorothioate linkage
  modified_base 8: mod_base = OTHER; note = Nucleotide with phosphorothioate linkage
  modified_base 9: mod_base = OTHER; note = Nucleotide with phosphorothioate linkage
  modified_base 10: mod_base = OTHER; note = Nucleotide with phosphorothioate linkage
  modified_base 11: mod_base = OTHER; note = Nucleotide with phosphorothioate linkage
  modified_base 12: mod_base = OTHER; note = 5-methylcytosine with phosphorothioate linkage
  modified_base 13: mod_base = OTHER; note = Nucleotide with phosphorothioate linkage
  modified_base 14: mod_base = OTHER; note = Nucleotide with phosphorothioate linkage
  modified_base 15: mod_base = OTHER; note = 2'-O-methoxyethyl modified nucleotide with phosphorothioate linkage
  modified_base 16: mod_base = OTHER; note = 2'-O-methoxyethyl modified nucleotide with phosphorothioate linkage
  modified_base 17: mod_base = OTHER; note = 2'-O-methoxyethyl modified thymine with phosphorothioate linkage
  modified_base 18: mod_base = OTHER; note = 2'-O-methoxyethyl modified nucleotide with phosphorothioate linkage
  modified_base 19: mod_base = OTHER; note = 2'-O-methoxyethyl 5-methylcytosine with phosphorothioate linkage
  modified_base 20: mod_base = OTHER; note = 2'-O-methoxyethyl modified nucleotide
  misc_feature 1..4: note = RNA
  misc_feature 5..14: note = DNA
  misc_feature 15..20: note = RNA
cagaggtgaagcgaagtgca

SEQ ID NO: 646 - DNA, 20 bp, synthetic construct
  source 1..20: mol_type = other DNA
  modified_base 1: mod_base = OTHER; note = 2'-O-methoxyethyl 5-methylcytosine with phosphorothioate linkage
  modified_base 2: mod_base = OTHER; note = 2'-O-methoxyethyl modified nucleotide with phosphorothioate linkage
  modified_base 3: mod_base = OTHER; note = 2'-O-methoxyethyl modified nucleotide with phosphorothioate linkage
  modified_base 4: mod_base = OTHER; note = 2'-O-methoxyethyl modified nucleotide with phosphorothioate linkage
  modified_base 5: mod_base = OTHER; note = 2'-O-methoxyethyl modified nucleotide with phosphorothioate linkage
  modified_base 6: mod_base = OTHER; note = 2'-O-methoxyethyl modified nucleotide with phosphorothioate linkage
  modified_base 7: mod_base = OTHER; note = 2'-O-methoxyethyl modified thymine with phosphorothioate linkage
  modified_base 8: mod_base = OTHER; note = Nucleotide with phosphorothioate linkage
  modified_base 9: mod_base = OTHER; note = Nucleotide with phosphorothioate linkage
  modified_base 10: mod_base = OTHER; note = Nucleotide with phosphorothioate linkage
  modified_base 11: mod_base = OTHER; note = Nucleotide with phosphorothioate linkage
  modified_base 12: mod_base = OTHER; note = 5-methylcytosine with phosphorothioate linkage
  modified_base 13: mod_base = OTHER; note = Nucleotide with phosphorothioate linkage
  modified_base 14: mod_base = OTHER; note = Nucleotide with phosphorothioate linkage
  modified_base 15: mod_base = OTHER; note = Nucleotide with phosphorothioate linkage
  modified_base 16: mod_base = OTHER; note = 2'-O-methoxyethyl modified nucleotide with phosphorothioate linkage
  modified_base 17: mod_base = OTHER; note = 2'-O-methoxyethyl modified thymine with phosphorothioate linkage
  modified_base 18: mod_base = OTHER; note = 2'-O-methoxyethyl modified nucleotide with phosphorothioate linkage
  modified_base 19: mod_base = OTHER; note = 2'-O-methoxyethyl 5-methylcytosine with phosphorothioate linkage
  modified_base 20: mod_base = OTHER; note = 2'-O-methoxyethyl modified nucleotide
  misc_feature 1..7: note = RNA
  misc_feature 8..15: note = DNA
  misc_feature 16..20: note = RNA
cagaggtgaagcgaagtgca

SEQ ID NO: 647 - DNA, 20 bp, synthetic construct
  source 1..20: mol_type = other DNA
  modified_base 1: mod_base = OTHER; note = 2'-O-methoxyethyl 5-methylcytosine with phosphorothioate linkage
  modified_base 2: mod_base = OTHER; note = 2'-O-methoxyethyl modified nucleotide with phosphorothioate linkage
  modified_base 3: mod_base = OTHER; note = 2'-O-methoxyethyl modified nucleotide with phosphorothioate linkage
  modified_base 4: mod_base = OTHER; note = 2'-O-methoxyethyl modified nucleotide with phosphorothioate linkage
  modified_base 5: mod_base = OTHER; note = 2'-O-methoxyethyl modified nucleotide with phosphorothioate linkage
  modified_base 6: mod_base = OTHER; note = 2'-O-methoxyethyl modified nucleotide with phosphorothioate linkage
  modified_base 7: mod_base = OTHER; note = Thymine with phosphorothioate linkage
  modified_base 8: mod_base = OTHER; note = Nucleotide with phosphorothioate linkage
  modified_base 9: mod_base = OTHER; note = Nucleotide with phosphorothioate linkage
  modified_base 10: mod_base = OTHER; note = Nucleotide with phosphorothioate linkage
  modified_base 11: mod_base = OTHER; note = Nucleotide with phosphorothioate linkage
  modified_base 12: mod_base = OTHER; note = 5-methylcytosine with phosphorothioate linkage
  modified_base 13: mod_base = OTHER; note = Nucleotide with phosphorothioate linkage
  modified_base 14: mod_base = OTHER; note = Nucleotide with phosphorothioate linkage
  modified_base 15: mod_base = OTHER; note = 2'-O-methoxyethyl modified nucleotide with phosphorothioate linkage
  modified_base 16: mod_base = OTHER; note = 2'-O-methoxyethyl modified nucleotide with phosphorothioate linkage
  modified_base 17: mod_base = OTHER; note = 2'-O-methoxyethyl modified thymine with phosphorothioate linkage
  modified_base 18: mod_base = OTHER; note = 2'-O-methoxyethyl modified nucleotide with phosphorothioate linkage
  modified_base 19: mod_base = OTHER; note = 2'-O-methoxyethyl 5-methylcytosine with phosphorothioate linkage
  modified_base 20: mod_base = OTHER; note = 2'-O-methoxyethyl modified nucleotide
  misc_feature 1..6: note = RNA
  misc_feature 7..14: note = DNA
  misc_feature 15..20: note = RNA
cagaggtgaagcgaagtgca

SEQ ID NO: 648 - DNA, 20 bp, synthetic construct
  source 1..20: mol_type = other DNA
  modified_base 1: mod_base = OTHER; note = 2'-O-methoxyethyl 5-methylcytosine with phosphorothioate linkage
  modified_base 2: mod_base = OTHER; note = 2'-O-methoxyethyl modified nucleotide with phosphorothioate linkage
  modified_base 3: mod_base = OTHER; note = 2'-O-methoxyethyl modified nucleotide with phosphorothioate linkage
  modified_base 4: mod_base = OTHER; note = 2'-O-methoxyethyl modified nucleotide with phosphorothioate linkage
  modified_base 5: mod_base = OTHER; note = 2'-O-methoxyethyl modified nucleotide with phosphorothioate linkage
  modified_base 6: mod_base = OTHER; note = Nucleotide with phosphorothioate linkage
  modified_base 7: mod_base = OTHER; note = Thymine with phosphorothioate linkage
  modified_base 8: mod_base = OTHER; note = Nucleotide with phosphorothioate linkage
  modified_base 9: mod_base = OTHER; note = Nucleotide with phosphorothioate linkage
  modified_base 10: mod_base = OTHER; note = Nucleotide with phosphorothioate linkage
  modified_base 11: mod_base = OTHER; note = Nucleotide with phosphorothioate linkage
  modified_base 12: mod_base = OTHER; note = 5-methylcytosine with phosphorothioate linkage
  modified_base 13: mod_base = OTHER; note = Nucleotide with phosphorothioate linkage
  modified_base 14: mod_base = OTHER; note = 2'-O-methoxyethyl modified nucleotide with phosphorothioate linkage
  modified_base 15: mod_base = OTHER; note = 2'-O-methoxyethyl modified nucleotide with phosphorothioate linkage
  modified_base 16: mod_base = OTHER; note = 2'-O-methoxyethyl modified nucleotide with phosphorothioate linkage
  modified_base 17: mod_base = OTHER; note = 2'-O-methoxyethyl modified thymine with phosphorothioate linkage
  modified_base 18: mod_base = OTHER; note = 2'-O-methoxyethyl modified nucleotide with phosphorothioate linkage
  modified_base 19: mod_base = OTHER; note = 2'-O-methoxyethyl 5-methylcytosine with phosphorothioate linkage
  modified_base 20: mod_base = OTHER; note = 2'-O-methoxyethyl modified nucleotide
  misc_feature 1..5: note = RNA
  misc_feature 6..13: note = DNA
  misc_feature 14..20: note = RNA
cagaggtgaagcgaagtgca

SEQ ID NO: 649 - DNA, 20 bp, synthetic construct
  source 1..20: mol_type = other DNA
  modified_base 1: mod_base = OTHER; note = 2'-O-methoxyethyl 5-methylcytosine with phosphorothioate linkage
  modified_base 2: mod_base = OTHER; note = 2'-O-methoxyethyl modified nucleotide with phosphorothioate linkage
  modified_base 3: mod_base = OTHER; note = 2'-O-methoxyethyl modified nucleotide with phosphorothioate linkage
  modified_base 4: mod_base = OTHER; note = 2'-O-methoxyethyl modified nucleotide with phosphorothioate linkage
  modified_base 5: mod_base = OTHER; note = 2'-O-methoxyethyl modified nucleotide with phosphorothioate linkage
  modified_base 6: mod_base = OTHER; note = 2'-O-methoxyethyl modified nucleotide with phosphorothioate linkage
  modified_base 7: mod_base = OTHER; note = 2'-O-methoxyethyl modified thymine with phosphorothioate linkage
  modified_base 8: mod_base = OTHER; note = Nucleotide with phosphorothioate linkage
  modified_base 9: mod_base = OTHER; note = Nucleotide with phosphorothioate linkage
  modified_base 10: mod_base = OTHER; note = Nucleotide with phosphorothioate linkage
  modified_base 11: mod_base = OTHER; note = Nucleotide with phosphorothioate linkage
  modified_base 12: mod_base = OTHER; note = 5-methylcytosine with phosphorothioate linkage
  modified_base 13: mod_base = OTHER; note = Nucleotide with phosphorothioate linkage
  modified_base 14: mod_base = OTHER; note = Nucleotide with phosphorothioate linkage
  modified_base 15: mod_base = OTHER; note = Nucleotide with phosphorothioate linkage
  modified_base 16: mod_base = OTHER; note = Nucleotide with phosphorothioate linkage
  modified_base 17: mod_base = OTHER; note = 2'-O-methoxyethyl modified thymine with phosphorothioate linkage
  modified_base 18: mod_base = OTHER; note = 2'-O-methoxyethyl modified nucleotide with phosphorothioate linkage
  modified_base 19: mod_base = OTHER; note = 2'-O-methoxyethyl 5-methylcytosine with phosphorothioate linkage
  modified_base 20: mod_base = OTHER; note = 2'-O-methoxyethyl modified nucleotide
  misc_feature 1..7: note = RNA
  misc_feature 8..16: note = DNA
  misc_feature 17..20: note = RNA
cagaggtgaagcgaagtgca

SEQ ID NO: 650 - DNA, 21 bp, synthetic construct
  source 1..21: mol_type = other DNA
  modified_base 1: mod_base = OTHER; note = 2'-O-methoxyethyl modified nucleotide with phosphorothioate linkage
  modified_base 2: mod_base = OTHER; note = 2'-O-methoxyethyl 5-methylcytosine with phosphorothioate linkage
  modified_base 3: mod_base = OTHER; note = 2'-O-methoxyethyl modified nucleotide with phosphorothioate linkage
  modified_base 4: mod_base = OTHER; note = 2'-O-methoxyethyl modified thymine with phosphorothioate linkage
  modified_base 5: mod_base = OTHER; note = Nucleotide with phosphorothioate linkage
  modified_base 6: mod_base = OTHER; note = 5-methylcytosine with phosphorothioate linkage
  modified_base 7: mod_base = OTHER; note = Nucleotide with phosphorothioate linkage
  modified_base 8: mod_base = OTHER; note = Nucleotide with phosphorothioate linkage
  modified_base 9: mod_base = OTHER; note = Nucleotide with phosphorothioate linkage
  modified_base 10: mod_base = OTHER; note = Nucleotide with phosphorothioate linkage
  modified_base 11: mod_base = OTHER; note = Nucleotide with phosphorothioate linkage
  modified_base 12: mod_base = OTHER; note = Thymine with phosphorothioate linkage
  modified_base 13: mod_base = OTHER; note = Nucleotide with phosphorothioate linkage
  modified_base 14: mod_base = OTHER; note = Nucleotide with phosphorothioate linkage
  modified_base 15: mod_base = OTHER; note = 2'-O-methoxyethyl modified nucleotide with phosphorothioate linkage
  modified_base 16: mod_base = OTHER; note = 2'-O-methoxyethyl modified nucleotide with phosphorothioate linkage
  modified_base 17: mod_base = OTHER; note = 2'-O-methoxyethyl 5-methylcytosine with phosphorothioate linkage
  modified_base 18: mod_base = OTHER; note = 2'-O-methoxyethyl modified nucleotide with phosphorothioate linkage
  modified_base 19: mod_base = OTHER; note = 2'-O-methoxyethyl modified nucleotide with phosphorothioate linkage
  modified_base 20: mod_base = OTHER; note = 2'-O-methoxyethyl modified nucleotide with phosphorothioate linkage
  modified_base 21: mod_base = OTHER; note = 2'-O-methoxyethyl modified nucleotide
  misc_feature 1..4: note = RNA
  misc_feature 5..14: note = DNA
  misc_feature 15..21: note = RNA
acgtgcagaggtgaagcgaag

SEQ ID NO: 651 - DNA, 21 bp, synthetic construct
  source 1..21: mol_type = other DNA
  modified_base 1: mod_base = OTHER; note = 2'-O-methoxyethyl modified nucleotide with phosphorothioate linkage
  modified_base 2: mod_base = OTHER; note = 2'-O-methoxyethyl 5-methylcytosine with phosphorothioate linkage
  modified_base 3: mod_base = OTHER; note = 2'-O-methoxyethyl modified nucleotide with phosphorothioate linkage
  modified_base 4: mod_base = OTHER; note = 2'-O-methoxyethyl modified thymine with phosphorothioate linkage
  modified_base 5: mod_base = OTHER; note = 2'-O-methoxyethyl modified nucleotide with phosphorothioate linkage
  modified_base 6: mod_base = OTHER; note = 5-methylcytosine with phosphorothioate linkage
  modified_base 7: mod_base = OTHER; note = Nucleotide with phosphorothioate linkage
  modified_base 8: mod_base = OTHER; note = Nucleotide with phosphorothioate linkage
  modified_base 9: mod_base = OTHER; note = Nucleotide with phosphorothioate linkage
  modified_base 10: mod_base = OTHER; note = Nucleotide with phosphorothioate linkage
  modified_base 11: mod_base = OTHER; note = Nucleotide with phosphorothioate linkage
  modified_base 12: mod_base = OTHER; note = Thymine with phosphorothioate linkage
  modified_base 13: mod_base = OTHER; note = Nucleotide with phosphorothioate linkage
  modified_base 14: mod_base = OTHER; note = Nucleotide with phosphorothioate linkage
  modified_base 15: mod_base = OTHER; note = Nucleotide with phosphorothioate linkage
  modified_base 16: mod_base = OTHER; note = 2'-O-methoxyethyl modified nucleotide with phosphorothioate linkage
  modified_base 17: mod_base = OTHER; note = 2'-O-methoxyethyl 5-methylcytosine with phosphorothioate linkage
  modified_base 18: mod_base = OTHER; note = 2'-O-methoxyethyl modified nucleotide with phosphorothioate linkage
  modified_base 19: mod_base = OTHER; note = 2'-O-methoxyethyl modified nucleotide with phosphorothioate linkage
  modified_base 20: mod_base = OTHER; note = 2'-O-methoxyethyl modified nucleotide with phosphorothioate linkage
  modified_base 21: mod_base = OTHER; note = 2'-O-methoxyethyl modified nucleotide
  misc_feature 1..5: note = RNA
  misc_feature 6..15: note = DNA
  misc_feature 16..21: note = RNA
acgtgcagaggtgaagcgaag

SEQ ID NO: 652 - DNA, 21 bp, synthetic construct
  source 1..21: mol_type = other DNA
  modified_base 1: mod_base = OTHER; note = 2'-O-methoxyethyl modified nucleotide with phosphorothioate linkage
  modified_base 2: mod_base = OTHER; note = 2'-O-methoxyethyl 5-methylcytosine with phosphorothioate linkage
  modified_base 3: mod_base = OTHER; note = 2'-O-methoxyethyl modified nucleotide with phosphorothioate linkage
  modified_base 4: mod_base = OTHER; note = 2'-O-methoxyethyl modified thymine with phosphorothioate linkage
  modified_base 5: mod_base = OTHER; note = 2'-O-methoxyethyl modified nucleotide with phosphorothioate linkage
  modified_base 6: mod_base = OTHER; note = 2'-O-methoxyethyl 5-methylcytosine with phosphorothioate linkage
  modified_base 7: mod_base = OTHER; note = Nucleotide with phosphorothioate linkage
  modified_base 8: mod_base = OTHER; note = Nucleotide with phosphorothioate linkage
  modified_base 9: mod_base = OTHER; note = Nucleotide with phosphorothioate linkage
  modified_base 10: mod_base = OTHER; note = Nucleotide with phosphorothioate linkage
  modified_base 11: mod_base = OTHER; note = Nucleotide with phosphorothioate linkage
  modified_base 12: mod_base = OTHER; note = Thymine with phosphorothioate linkage
  modified_base 13: mod_base = OTHER; note = Nucleotide with phosphorothioate linkage
  modified_base 14: mod_base = OTHER; note = Nucleotide with phosphorothioate linkage
  modified_base 15: mod_base = OTHER; note = Nucleotide with phosphorothioate linkage
  modified_base 16: mod_base = OTHER; note = Nucleotide with phosphorothioate linkage
  modified_base 17: mod_base = OTHER; note = 2'-O-methoxyethyl 5-methylcytosine with phosphorothioate linkage
  modified_base 18: mod_base = OTHER; note = 2'-O-methoxyethyl modified nucleotide with phosphorothioate linkage
  modified_base 19: mod_base = OTHER; note = 2'-O-methoxyethyl modified nucleotide with phosphorothioate linkage
  modified_base 20: mod_base = OTHER; note = 2'-O-methoxyethyl modified nucleotide with phosphorothioate linkage
  modified_base 21: mod_base = OTHER; note = 2'-O-methoxyethyl modified nucleotide
  misc_feature 1..6: note = RNA
  misc_feature 7..16: note = DNA
  misc_feature 17..21: note = RNA
acgtgcagaggtgaagcgaag

SEQ ID NO: 653 - DNA, 21 bp, synthetic construct
  source 1..21: mol_type = other DNA
  modified_base 1: mod_base = OTHER; note = 2'-O-methoxyethyl modified nucleotide with phosphorothioate linkage
  modified_base 2: mod_base = OTHER; note = 2'-O-methoxyethyl 5-methylcytosine with phosphorothioate linkage
  modified_base 3: mod_base = OTHER; note = 2'-O-methoxyethyl modified nucleotide with phosphorothioate linkage
  modified_base 4: mod_base = OTHER; note = 2'-O-methoxyethyl modified thymine with phosphorothioate linkage
  modified_base 5: mod_base = OTHER; note = 2'-O-methoxyethyl modified nucleotide with phosphorothioate linkage
  modified_base 6: mod_base = OTHER; note = 2'-O-methoxyethyl 5-methylcytosine with phosphorothioate linkage
  modified_base 7: mod_base = OTHER; note = 2'-O-methoxyethyl modified nucleotide with phosphorothioate linkage
  modified_base 8: mod_base = OTHER; note = Nucleotide with phosphorothioate linkage
  modified_base 9: mod_base = OTHER; note = Nucleotide with phosphorothioate linkage
  modified_base 10: mod_base = OTHER; note = Nucleotide with phosphorothioate linkage
  modified_base 11: mod_base = OTHER; note = Nucleotide with phosphorothioate linkage
  modified_base 12: mod_base = OTHER; note = Thymine with phosphorothioate linkage
  modified_base 13: mod_base = OTHER; note = Nucleotide with phosphorothioate linkage
  modified_base 14: mod_base = OTHER; note = Nucleotide with phosphorothioate linkage
  modified_base 15: mod_base = OTHER; note = Nucleotide with phosphorothioate linkage
  modified_base 16: mod_base = OTHER; note = Nucleotide with phosphorothioate linkage
  modified_base 17: mod_base = OTHER; note = 5-methylcytosine with phosphorothioate linkage
  modified_base 18: mod_base = OTHER; note = 2'-O-methoxyethyl modified nucleotide with phosphorothioate linkage
  modified_base 19: mod_base = OTHER; note = 2'-O-methoxyethyl modified nucleotide with phosphorothioate linkage
  modified_base 20: mod_base = OTHER; note = 2'-O-methoxyethyl modified nucleotide with phosphorothioate linkage
  modified_base 21: mod_base = OTHER; note = 2'-O-methoxyethyl modified nucleotide
  misc_feature 1..7: note = RNA
  misc_feature 8..17: note = DNA
  misc_feature 18..21: note = RNA
acgtgcagaggtgaagcgaag

SEQ ID NO: 654 - DNA, 21 bp, synthetic construct
  source 1..21: mol_type = other DNA
  modified_base 1: mod_base = OTHER; note = 2'-O-methoxyethyl modified nucleotide with phosphorothioate linkage
  modified_base 2: mod_base = OTHER; note = 2'-O-methoxyethyl 5-methylcytosine with phosphorothioate linkage
  modified_base 3: mod_base = OTHER; note = 2'-O-methoxyethyl modified nucleotide with phosphorothioate linkage
  modified_base 4: mod_base = OTHER; note = 2'-O-methoxyethyl modified thymine with phosphorothioate linkage
  modified_base 5: mod_base = OTHER; note = Nucleotide with phosphorothioate linkage
  modified_base 6: mod_base = OTHER; note = 5-methylcytosine with phosphorothioate linkage
  modified_base 7: mod_base = OTHER; note = Nucleotide with phosphorothioate linkage
  modified_base 8: mod_base = OTHER; note = Nucleotide with phosphorothioate linkage
  modified_base 9: mod_base = OTHER; note = Nucleotide with phosphorothioate linkage
  modified_base 10: mod_base = OTHER; note = Nucleotide with phosphorothioate linkage
  modified_base 11: mod_base = OTHER; note = Nucleotide with phosphorothioate linkage
  modified_base 12: mod_base = OTHER; note = Thymine with phosphorothioate linkage
  modified_base 13: mod_base = OTHER; note = Nucleotide with phosphorothioate linkage
  modified_base 14: mod_base = OTHER; note = 2'-O-methoxyethyl modified nucleotide with phosphorothioate linkage
  modified_base 15: mod_base = OTHER; note = 2'-O-methoxyethyl modified nucleotide with phosphorothioate linkage
  modified_base 16: mod_base = OTHER; note = 2'-O-methoxyethyl modified nucleotide with phosphorothioate linkage
  modified_base 17: mod_base = OTHER; note = 2'-O-methoxyethyl 5-methylcytosine with phosphorothioate linkage
  modified_base 18: mod_base = OTHER; note = 2'-O-methoxyethyl modified nucleotide with phosphorothioate linkage
  modified_base 19: mod_base = OTHER; note = 2'-O-methoxyethyl modified nucleotide with phosphorothioate linkage
  modified_base 20: mod_base = OTHER; note = 2'-O-methoxyethyl modified nucleotide with phosphorothioate linkage
  modified_base 21: mod_base = OTHER; note = 2'-O-methoxyethyl modified nucleotide
  misc_feature 1..4: note = RNA
  misc_feature 5..13: note = DNA
  misc_feature 14..21: note = RNA
acgtgcagaggtgaagcgaag

SEQ ID NO: 655 - DNA, 21 bp, synthetic construct
  source 1..21: mol_type = other DNA
  modified_base 1: mod_base = OTHER; note = 2'-O-methoxyethyl modified nucleotide with phosphorothioate linkage
  modified_base 2: mod_base = OTHER; note = 2'-O-methoxyethyl 5-methylcytosine with phosphorothioate linkage
  modified_base 3: mod_base = OTHER; note = 2'-O-methoxyethyl modified nucleotide with phosphorothioate linkage
  modified_base 4: mod_base = OTHER; note = 2'-O-methoxyethyl modified thymine with phosphorothioate linkage
  modified_base 5: mod_base = OTHER; note = 2'-O-methoxyethyl modified nucleotide with phosphorothioate linkage
  modified_base 6: mod_base = OTHER; note = 5-methylcytosine with phosphorothioate linkage
  modified_base 7: mod_base = OTHER; note = Nucleotide with phosphorothioate linkage
  modified_base 8: mod_base = OTHER; note = Nucleotide with phosphorothioate linkage
  modified_base 9: mod_base = OTHER; note = Nucleotide with phosphorothioate linkage
  modified_base 10: mod_base = OTHER; note = Nucleotide with phosphorothioate linkage
  modified_base 11: mod_base = OTHER; note = Nucleotide with phosphorothioate linkage
  modified_base 12: mod_base = OTHER; note = Thymine with phosphorothioate linkage
  modified_base 13: mod_base = OTHER; note = Nucleotide with phosphorothioate linkage
  modified_base 14: mod_base = OTHER; note = Nucleotide with phosphorothioate linkage
  modified_base 15: mod_base = OTHER; note = 2'-O-methoxyethyl modified nucleotide with phosphorothioate linkage
  modified_base 16: mod_base = OTHER; note = 2'-O-methoxyethyl modified nucleotide with phosphorothioate linkage
  modified_base 17: mod_base = OTHER; note = 2'-O-methoxyethyl 5-methylcytosine with phosphorothioate linkage
  modified_base 18: mod_base = OTHER; note = 2'-O-methoxyethyl modified nucleotide with phosphorothioate linkage
  modified_base 19: mod_base = OTHER; note = 2'-O-methoxyethyl modified nucleotide with phosphorothioate linkage
  modified_base 20: mod_base = OTHER; note = 2'-O-methoxyethyl modified nucleotide with phosphorothioate linkage
  modified_base 21: mod_base = OTHER; note = 2'-O-methoxyethyl modified nucleotide
  misc_feature 1..5: note = RNA
  misc_feature 6..14: note = DNA
  misc_feature 15..21: note = RNA
acgtgcagaggtgaagcgaag

SEQ ID NO: 656 - DNA, 21 bp, synthetic construct
  source 1..21: mol_type = other DNA
  modified_base 1: mod_base = OTHER; note = 2'-O-methoxyethyl modified nucleotide with phosphorothioate linkage
  modified_base 2: mod_base = OTHER; note = 2'-O-methoxyethyl 5-methylcytosine with phosphorothioate linkage
  modified_base 3: mod_base = OTHER; note = 2'-O-methoxyethyl modified nucleotide with phosphorothioate linkage
  modified_base 4: mod_base = OTHER; note = 2'-O-methoxyethyl modified thymine with phosphorothioate linkage
  modified_base 5: mod_base = OTHER; note = 2'-O-methoxyethyl modified nucleotide with phosphorothioate linkage
  modified_base 6: mod_base = OTHER; note = 2'-O-methoxyethyl 5-methylcytosine with phosphorothioate linkage
  modified_base 7: mod_base = OTHER; note = Nucleotide with phosphorothioate linkage
  modified_base 8: mod_base = OTHER; note = Nucleotide with phosphorothioate linkage
  modified_base 9: mod_base = OTHER; note = Nucleotide with phosphorothioate linkage
  modified_base 10: mod_base = OTHER; note = Nucleotide with phosphorothioate linkage
  modified_base 11: mod_base = OTHER; note = Nucleotide with phosphorothioate linkage
  modified_base 12: mod_base = OTHER; note = Thymine with phosphorothioate linkage
  modified_base 13: mod_base = OTHER; note = Nucleotide with phosphorothioate linkage
  modified_base 14: mod_base = OTHER; note = Nucleotide with phosphorothioate linkage
  modified_base 15: mod_base = OTHER; note = Nucleotide with phosphorothioate linkage
  modified_base 16: mod_base = OTHER; note = 2'-O-methoxyethyl modified nucleotide with phosphorothioate linkage
  modified_base 17: mod_base = OTHER; note = 2'-O-methoxyethyl 5-methylcytosine with phosphorothioate linkage
  modified_base 18: mod_base = OTHER; note = 2'-O-methoxyethyl modified nucleotide with phosphorothioate linkage
  modified_base 19: mod_base = OTHER; note = 2'-O-methoxyethyl modified nucleotide with phosphorothioate linkage
  modified_base 20: mod_base = OTHER; note = 2'-O-methoxyethyl modified nucleotide with phosphorothioate linkage
  modified_base 21: mod_base = OTHER; note = 2'-O-methoxyethyl modified nucleotide
  misc_feature 1..6: note = RNA
  misc_feature 7..15: note = DNA
  misc_feature 16..21: note = RNA
acgtgcagaggtgaagcgaag

SEQ ID NO: 657 - DNA, 21 bp, synthetic construct
  source 1..21: mol_type = other DNA
  modified_base 1: mod_base = OTHER; note = 2'-O-methoxyethyl modified nucleotide with phosphorothioate linkage
  modified_base 2: mod_base = OTHER; note = 2'-O-methoxyethyl 5-methylcytosine with phosphorothioate linkage
  modified_base 3: mod_base = OTHER; note = 2'-O-methoxyethyl modified nucleotide with phosphorothioate linkage
  modified_base 4: mod_base = OTHER; note = 2'-O-methoxyethyl modified thymine with phosphorothioate linkage
  modified_base 5: mod_base = OTHER; note = 2'-O-methoxyethyl modified nucleotide with phosphorothioate linkage
  modified_base 6: mod_base = OTHER; note = 2'-O-methoxyethyl 5-methylcytosine with phosphorothioate linkage
  modified_base 7: mod_base = OTHER; note = 2'-O-methoxyethyl modified nucleotide with phosphorothioate linkage
  modified_base 8: mod_base = OTHER; note = Nucleotide with phosphorothioate linkage
  modified_base 9: mod_base = OTHER; note = Nucleotide with phosphorothioate linkage
  modified_base 10: mod_base = OTHER; note = Nucleotide with phosphorothioate linkage
  modified_base 11: mod_base = OTHER; note = Nucleotide with phosphorothioate linkage
  modified_base 12: mod_base = OTHER; note = Thymine with phosphorothioate linkage
  modified_base 13: mod_base = OTHER; note = Nucleotide with phosphorothioate linkage
  modified_base 14: mod_base = OTHER; note = Nucleotide with phosphorothioate linkage
  modified_base 15: mod_base = OTHER; note = Nucleotide with phosphorothioate linkage
  modified_base 16: mod_base = OTHER; note = Nucleotide with phosphorothioate linkage
  modified_base 17: mod_base = OTHER; note = 2'-O-methoxyethyl 5-methylcytosine with phosphorothioate linkage
  modified_base 18: mod_base = OTHER; note = 2'-O-methoxyethyl modified nucleotide with phosphorothioate linkage
  modified_base 19: mod_base = OTHER; note = 2'-O-methoxyethyl modified nucleotide with phosphorothioate linkage
  modified_base 20: mod_base = OTHER; note = 2'-O-methoxyethyl modified nucleotide with phosphorothioate linkage
  modified_base 21: mod_base = OTHER; note = 2'-O-methoxyethyl modified nucleotide
  misc_feature 1..7: note = RNA
  misc_feature 8..16: note = DNA
  misc_feature 17..21: note = RNA
acgtgcagaggtgaagcgaag

SEQ ID NO: 658 - DNA, 21 bp, synthetic construct
  source 1..21: mol_type = other DNA
  modified_base 1: mod_base = OTHER; note = 2'-O-methoxyethyl modified nucleotide with phosphorothioate linkage
  modified_base 2: mod_base = OTHER; note = 2'-O-methoxyethyl 5-methylcytosine with phosphorothioate linkage
  modified_base 3: mod_base = OTHER; note = 2'-O-methoxyethyl modified nucleotide with phosphorothioate linkage
  modified_base 4: mod_base = OTHER; note = 2'-O-methoxyethyl modified thymine with phosphorothioate linkage
  modified_base 5: mod_base = OTHER; note = 2'-O-methoxyethyl modified nucleotide with phosphorothioate linkage
  modified_base 6: mod_base = OTHER; note = 2'-O-methoxyethyl 5-methylcytosine with phosphorothioate linkage
  modified_base 7: mod_base = OTHER; note = 2'-O-methoxyethyl modified nucleotide with phosphorothioate linkage
  modified_base 8: mod_base = OTHER; note = 2'-O-methoxyethyl modified nucleotide with phosphorothioate linkage
  modified_base 9: mod_base = OTHER; note = Nucleotide with phosphorothioate linkage
  modified_base 10: mod_base = OTHER; note = Nucleotide with phosphorothioate linkage
  modified_base 11: mod_base = OTHER; note = Nucleotide with phosphorothioate linkage
  modified_base 12: mod_base = OTHER; note = Thymine with phosphorothioate linkage
  modified_base 13: mod_base = OTHER; note = Nucleotide with phosphorothioate linkage
  modified_base 14: mod_base = OTHER; note = Nucleotide with phosphorothioate linkage
  modified_base 15: mod_base = OTHER; note = Nucleotide with phosphorothioate linkage
  modified_base 16: mod_base = OTHER; note = Nucleotide with phosphorothioate linkage
  modified_base 17: mod_base = OTHER; note = 5-methylcytosine with phosphorothioate linkage
  modified_base 18: mod_base = OTHER; note = 2'-O-methoxyethyl modified nucleotide with phosphorothioate linkage
  modified_base 19: mod_base = OTHER; note = 2'-O-methoxyethyl modified nucleotide with phosphorothioate linkage
  modified_base 20: mod_base = OTHER; note = 2'-O-methoxyethyl modified nucleotide with phosphorothioate linkage
  modified_base 21: mod_base = OTHER; note = 2'-O-methoxyethyl modified nucleotide
  misc_feature 1..8: note = RNA
  misc_feature 9..17: note = DNA
  misc_feature 18..21: note = RNA
acgtgcagaggtgaagcgaag

SEQ ID NO: 659 - DNA, 21 bp, synthetic construct
  source 1..21: mol_type = other DNA
  modified_base 1: mod_base = OTHER; note = 2'-O-methoxyethyl modified nucleotide with phosphorothioate linkage
  modified_base 2: mod_base = OTHER; note = 2'-O-methoxyethyl 5-methylcytosine with phosphorothioate linkage
  modified_base 3: mod_base = OTHER; note = 2'-O-methoxyethyl modified nucleotide with phosphorothioate linkage
  modified_base 4: mod_base = OTHER; note = 2'-O-methoxyethyl modified thymine with phosphorothioate linkage
  modified_base 5: mod_base = OTHER; note = 2'-O-methoxyethyl modified nucleotide with phosphorothioate linkage
  modified_base 6: mod_base = OTHER; note = 2'-O-methoxyethyl 5-methylcytosine with phosphorothioate linkage
  modified_base 7: mod_base = OTHER; note = Nucleotide with phosphorothioate linkage
  modified_base 8: mod_base = OTHER; note = Nucleotide with phosphorothioate linkage
  modified_base 9: mod_base = OTHER; note = Nucleotide with phosphorothioate linkage
  modified_base 10: mod_base = OTHER; note = Nucleotide with phosphorothioate linkage
  modified_base 11: mod_base = OTHER; note = Nucleotide with phosphorothioate linkage
  modified_base 12: mod_base = OTHER; note = Thymine with phosphorothioate linkage
  modified_base 13: mod_base = OTHER; note = Nucleotide with phosphorothioate linkage
  modified_base 14: mod_base = OTHER; note = Nucleotide with phosphorothioate linkage
  modified_base 15: mod_base = OTHER; note = 2'-O-methoxyethyl modified nucleotide with phosphorothioate linkage
  modified_base 16: mod_base = OTHER; note = 2'-O-methoxyethyl modified nucleotide with phosphorothioate linkage
  modified_base 17: mod_base = OTHER; note = 2'-O-methoxyethyl 5-methylcytosine with phosphorothioate linkage
  modified_base 18: mod_base = OTHER; note = 2'-O-methoxyethyl modified nucleotide with phosphorothioate linkage
  modified_base 19: mod_base = OTHER; note = 2'-O-methoxyethyl modified nucleotide with phosphorothioate linkage
  modified_base 20: mod_base = OTHER; note = 2'-O-methoxyethyl modified nucleotide with phosphorothioate linkage
  modified_base 21: mod_base = OTHER; note = 2'-O-methoxyethyl modified nucleotide
  misc_feature 1..6: note = RNA
  misc_feature 7..14: note = DNA
  misc_feature 15..21: note = RNA
acgtgcagaggtgaagcgaag

SEQ ID NO: 660 - DNA, 21 bp, synthetic construct
  source 1..21: mol_type = other DNA
  modified_base 1: mod_base = OTHER; note = 2'-O-methoxyethyl modified nucleotide with phosphorothioate linkage
  modified_base 2: mod_base = OTHER; note = 2'-O-methoxyethyl 5-methylcytosine with phosphorothioate linkage
  modified_base 3: mod_base = OTHER; note = 2'-O-methoxyethyl modified nucleotide with phosphorothioate linkage
  modified_base 4: mod_base = OTHER; note = 2'-O-methoxyethyl modified thymine with phosphorothioate linkage
  modified_base 5: mod_base = OTHER; note = 2'-O-methoxyethyl modified nucleotide with phosphorothioate linkage
  modified_base 6: mod_base = OTHER; note = 2'-O-methoxyethyl 5-methylcytosine with phosphorothioate linkage
  modified_base 7: mod_base = OTHER; note = 2'-O-methoxyethyl modified nucleotide with phosphorothioate linkage
  modified_base 8: mod_base = OTHER; note = Nucleotide with phosphorothioate linkage
  modified_base 9: mod_base = OTHER; note = Nucleotide with phosphorothioate linkage
  modified_base 10: mod_base = OTHER; note = Nucleotide with phosphorothioate linkage
  modified_base 11: mod_base = OTHER; note = Nucleotide with phosphorothioate linkage
  modified_base 12: mod_base = OTHER; note = Thymine with phosphorothioate linkage
  modified_base 13: mod_base = OTHER; note = Nucleotide with phosphorothioate linkage
  modified_base 14: mod_base = OTHER; note = Nucleotide with phosphorothioate linkage
  modified_base 15: mod_base = OTHER; note = Nucleotide with phosphorothioate linkage
  modified_base 16: mod_base = OTHER; note = 2'-O-methoxyethyl modified nucleotide with phosphorothioate linkage
  modified_base 17: mod_base = OTHER; note = 2'-O-methoxyethyl 5-methylcytosine with phosphorothioate linkage
  modified_base 18: mod_base = OTHER; note = 2'-O-methoxyethyl modified nucleotide with phosphorothioate linkage
  modified_base 19: mod_base = OTHER; note = 2'-O-methoxyethyl modified nucleotide with phosphorothioate linkage
  modified_base 20: mod_base = OTHER; note = 2'-O-methoxyethyl modified nucleotide with phosphorothioate linkage
  modified_base 21: mod_base = OTHER; note = 2'-O-methoxyethyl modified nucleotide
  misc_feature 1..7: note = RNA
  misc_feature 8..15: note = DNA
  misc_feature 16..21: note = RNA
acgtgcagaggtgaagcgaag

SEQ ID NO: 661 - DNA, 21 bp, synthetic construct
  source 1..21: mol_type = other DNA
  modified_base 1: mod_base = OTHER; note = 2'-O-methoxyethyl modified nucleotide with phosphorothioate linkage
  modified_base 2: mod_base = OTHER; note = 2'-O-methoxyethyl 5-methylcytosine with phosphorothioate linkage
  modified_base 3: mod_base = OTHER; note = 2'-O-methoxyethyl modified nucleotide with phosphorothioate linkage
  modified_base 4: mod_base = OTHER; note = 2'-O-methoxyethyl modified thymine with phosphorothioate linkage
  modified_base 5: mod_base = OTHER; note = 2'-O-methoxyethyl modified nucleotide with phosphorothioate linkage
  modified_base 6: mod_base = OTHER; note = 5-methylcytosine with phosphorothioate linkage
  modified_base 7: mod_base = OTHER; note = Nucleotide with phosphorothioate linkage
  modified_base 8: mod_base = OTHER; note = Nucleotide with phosphorothioate linkage
  modified_base 9: mod_base = OTHER; note = Nucleotide with phosphorothioate linkage
  modified_base 10: mod_base = OTHER; note = Nucleotide with phosphorothioate linkage
  modified_base 11: mod_base = OTHER; note = Nucleotide with phosphorothioate linkage
  modified_base 12: mod_base = OTHER; note = Thymine with phosphorothioate linkage
  modified_base 13: mod_base = OTHER; note = Nucleotide with phosphorothioate linkage
  modified_base 14: mod_base = OTHER; note = Nucleotide with phosphorothioate linkage
  modified_base 15: mod_base = OTHER; note = Nucleotide with phosphorothioate linkage
  modified_base 16: mod_base = OTHER; note = Nucleotide with phosphorothioate linkage
  modified_base 17: mod_base = OTHER; note = 2'-O-methoxyethyl 5-methylcytosine with phosphorothioate linkage
  modified_base 18: mod_base = OTHER; note = 2'-O-methoxyethyl modified nucleotide with phosphorothioate linkage
  modified_base 19: mod_base = OTHER; note = 2'-O-methoxyethyl modified nucleotide with phosphorothioate linkage
  modified_base 20: mod_base = OTHER; note = 2'-O-methoxyethyl modified nucleotide with phosphorothioate linkage
  modified_base 21: mod_base = OTHER; note = 2'-O-methoxyethyl modified nucleotide
  misc_feature 1..5: note = RNA
  misc_feature 6..16: note = DNA
  misc_feature 17..21: note = RNA
acgtgcagaggtgaagcgaag

SEQ ID NO: 662 - DNA, 20 bp, synthetic construct
  source 1..20: mol_type = other DNA
  modified_base 1: mod_base = OTHER; note = 2'-O-methoxyethyl 5-methylcytosine with phosphorothioate linkage
  modified_base 2: mod_base = OTHER; note = 2'-O-methoxyethyl modified nucleotide with phosphorothioate linkage
  modified_base 3: mod_base = OTHER; note = Locked nucleic acid with phosphorothioate linkage
  modified_base 4: mod_base = OTHER; note = 2'-O-methoxyethyl modified nucleotide with phosphorothioate linkage
  modified_base 5: mod_base = OTHER; note = 2'-O-methoxyethyl modified nucleotide with mesyl phosphoroamidate linkage
  modified_base 6: mod_base = OTHER; note = Nucleotide with phosphorothioate linkage
  modified_base 7: mod_base = OTHER; note = Thymine with phosphorothioate linkage
  modified_base 8: mod_base = OTHER; note = Nucleotide with phosphorothioate linkage
  modified_base 9: mod_base = OTHER; note = Nucleotide with phosphorothioate linkage
  modified_base 10: mod_base = OTHER; note = Nucleotide with phosphorothioate linkage
  modified_base 11: mod_base = OTHER; note = Nucleotide with phosphorothioate linkage
  modified_base 12: mod_base = OTHER; note = 5-methylcytosine with phosphorothioate linkage
  modified_base 13: mod_base = OTHER; note = Nucleotide with phosphorothioate linkage
  modified_base 14: mod_base = OTHER; note = Nucleotide with phosphorothioate linkage
  modified_base 15: mod_base = OTHER; note = Nucleotide with phosphorothioate linkage
  modified_base 16: mod_base = OTHER; note = 2'-O-methoxyethyl modified nucleotide with phosphorothioate linkage
  modified_base 17: mod_base = OTHER; note = 2'-O-methoxyethyl modified thymine with phosphorothioate linkage
  modified_base 18: mod_base = OTHER; note = Locked nucleic acid with phosphorothioate linkage
  modified_base 19: mod_base = OTHER; note = 2'-O-methoxyethyl 5-methylcytosine with phosphorothioate linkage
  modified_base 20: mod_base = OTHER; note = 2'-O-methoxyethyl modified nucleotide
  misc_feature 1..5: note = RNA
  misc_feature 6..15: note = DNA
  misc_feature 16..20: note = RNA
cagaggtgaagcgaagtgca

SEQ ID NO: 663 - DNA, 20 bp, synthetic construct
  source 1..20: mol_type = other DNA
  modified_base 1: mod_base = OTHER; note = 2'-O-methoxyethyl 5-methylcytosine with phosphorothioate linkage
  modified_base 2: mod_base = OTHER; note = 2'-O-methoxyethyl modified nucleotide with phosphorothioate linkage
  modified_base 3: mod_base = OTHER; note = Locked nucleic acid with phosphorothioate linkage
  modified_base 4: mod_base = OTHER; note = 2'-O-methoxyethyl modified nucleotide with phosphorothioate linkage
  modified_base 5: mod_base = OTHER; note = 2'-O-methoxyethyl modified nucleotide with phosphorothioate linkage
  modified_base 6: mod_base = OTHER; note = Nucleotide with mesyl phosphoroamidate linkage
  modified_base 7: mod_base = OTHER; note = Thymine with phosphorothioate linkage
  modified_base 8: mod_base = OTHER; note = Nucleotide with phosphorothioate linkage
  modified_base 9: mod_base = OTHER; note = Nucleotide with phosphorothioate linkage
  modified_base 10: mod_base = OTHER; note = Nucleotide with phosphorothioate linkage
  modified_base 11: mod_base = OTHER; note = Nucleotide with phosphorothioate linkage
  modified_base 12: mod_base = OTHER; note = 5-methylcytosine with phosphorothioate linkage
  modified_base 13: mod_base = OTHER; note = Nucleotide with phosphorothioate linkage
  modified_base 14: mod_base = OTHER; note = Nucleotide with phosphorothioate linkage
  modified_base 15: mod_base = OTHER; note = Nucleotide with phosphorothioate linkage
  modified_base 16: mod_base = OTHER; note = 2'-O-methoxyethyl modified nucleotide with phosphorothioate linkage
  modified_base 17: mod_base = OTHER; note = 2'-O-methoxyethyl modified thymine with phosphorothioate linkage
  modified_base 18: mod_base = OTHER; note = Locked nucleic acid with phosphorothioate linkage
  modified_base 19: mod_base = OTHER; note = 2'-O-methoxyethyl 5-methylcytosine with phosphorothioate linkage
  modified_base 20: mod_base = OTHER; note = 2'-O-methoxyethyl modified nucleotide
  misc_feature 1..5: note = RNA
  misc_feature 6..15: note = DNA
  misc_feature 16..20: note = RNA
cagaggtgaagcgaagtgca

SEQ ID NO: 664 - DNA, 20 bp, synthetic construct
  source 1..20: mol_type = other DNA
  modified_base 1: mod_base = OTHER; note = 2'-O-methoxyethyl 5-methylcytosine with phosphorothioate linkage
  modified_base 2: mod_base = OTHER; note = 2'-O-methoxyethyl modified nucleotide with phosphorothioate linkage
  modified_base 3: mod_base = OTHER; note = Locked nucleic acid with phosphorothioate linkage
  modified_base 4: mod_base = OTHER; note = 2'-O-methoxyethyl modified nucleotide with phosphorothioate linkage
  modified_base 5: mod_base = OTHER; note = 2'-O-methoxyethyl modified nucleotide with phosphorothioate linkage
  modified_base 6: mod_base = OTHER; note = Nucleotide with phosphorothioate linkage
  modified_base 7: mod_base = OTHER; note = Thymine with mesyl phosphoroamidate linkage
  modified_base 8: mod_base = OTHER; note = Nucleotide with phosphorothioate linkage
  modified_base 9: mod_base = OTHER; note = Nucleotide with phosphorothioate linkage
  modified_base 10: mod_base = OTHER; note = Nucleotide with phosphorothioate linkage
  modified_base 11: mod_base = OTHER; note = Nucleotide with phosphorothioate linkage
  modified_base 12: mod_base = OTHER; note = 5-methylcytosine with phosphorothioate linkage
  modified_base 13: mod_base = OTHER; note = Nucleotide with phosphorothioate linkage
  modified_base 14: mod_base = OTHER; note = Nucleotide with phosphorothioate linkage
  modified_base 15: mod_base = OTHER; note = Nucleotide with phosphorothioate linkage
  modified_base 16: mod_base = OTHER; note = 2'-O-methoxyethyl modified nucleotide with phosphorothioate linkage
  modified_base 17: mod_base = OTHER; note = 2'-O-methoxyethyl modified thymine with phosphorothioate linkage
  modified_base 18: mod_base = OTHER; note = Locked nucleic acid with phosphorothioate linkage
  modified_base 19: mod_base = OTHER; note = 2'-O-methoxyethyl 5-methylcytosine with phosphorothioate linkage
  modified_base 20: mod_base = OTHER; note = 2'-O-methoxyethyl modified nucleotide
  misc_feature 1..5: note = RNA
  misc_feature 6..15: note = DNA
  misc_feature 16..20: note = RNA
cagaggtgaagcgaagtgca

SEQ ID NO: 665 - DNA, 20 bp, synthetic construct
  source 1..20: mol_type = other DNA
  modified_base 1: mod_base = OTHER; note = 2'-O-methoxyethyl 5-methylcytosine with phosphorothioate linkage
  modified_base 2: mod_base = OTHER; note = 2'-O-methoxyethyl modified nucleotide with phosphorothioate linkage
  modified_base 3: mod_base = OTHER; note = Locked nucleic acid with phosphorothioate linkage
  modified_base 4: mod_base = OTHER; note = 2'-O-methoxyethyl modified nucleotide with phosphorothioate linkage
  modified_base 5: mod_base = OTHER; note = 2'-O-methoxyethyl modified nucleotide with phosphorothioate linkage
  modified_base 6: mod_base = OTHER; note = Nucleotide with phosphorothioate linkage
  modified_base 7: mod_base = OTHER; note = Thymine with phosphorothioate linkage
  modified_base 8: mod_base = OTHER; note = Nucleotide with mesyl phosphoroamidate linkage
  modified_base 9: mod_base = OTHER; note = Nucleotide with phosphorothioate linkage
  modified_base 10: mod_base = OTHER; note = Nucleotide with phosphorothioate linkage
  modified_base 11: mod_base = OTHER; note = Nucleotide with phosphorothioate linkage
  modified_base 12: mod_base = OTHER; note = 5-methylcytosine with phosphorothioate linkage
  modified_base 13: mod_base = OTHER; note = Nucleotide with phosphorothioate linkage
  modified_base 14: mod_base = OTHER; note = Nucleotide with phosphorothioate linkage
  modified_base 15: mod_base = OTHER; note = Nucleotide with phosphorothioate linkage
  modified_base 16: mod_base = OTHER; note = 2'-O-methoxyethyl modified nucleotide with phosphorothioate linkage
  modified_base 17: mod_base = OTHER; note = 2'-O-methoxyethyl modified thymine with phosphorothioate linkage
  modified_base 18: mod_base = OTHER; note = Locked nucleic acid with phosphorothioate linkage
  modified_base 19: mod_base = OTHER; note = 2'-O-methoxyethyl 5-methylcytosine with phosphorothioate linkage
  modified_base 20: mod_base = OTHER; note = 2'-O-methoxyethyl modified nucleotide
  misc_feature 1..5: note = RNA
  misc_feature 6..15: note = DNA
  misc_feature 16..20: note = RNA
cagaggtgaagcgaagtgca

SEQ ID NO: 666 - DNA, 20 bp, synthetic construct
  source 1..20: mol_type = other DNA
  modified_base 1: mod_base = OTHER; note = 2'-O-methoxyethyl 5-methylcytosine with phosphorothioate linkage
  modified_base 2: mod_base = OTHER; note = 2'-O-methoxyethyl modified nucleotide with phosphorothioate linkage
  modified_base 3: mod_base = OTHER; note = Locked nucleic acid with phosphorothioate linkage
  modified_base 4: mod_base = OTHER; note = 2'-O-methoxyethyl modified nucleotide with phosphorothioate linkage
  modified_base 5: mod_base = OTHER; note = 2'-O-methoxyethyl modified nucleotide with phosphorothioate linkage
  modified_base 6: mod_base = OTHER; note = Nucleotide with phosphorothioate linkage
  modified_base 7: mod_base = OTHER; note = Thymine with phosphorothioate linkage
  modified_base 8: mod_base = OTHER; note = Nucleotide with phosphorothioate linkage
  modified_base 9: mod_base = OTHER; note = Nucleotide with mesyl phosphoroamidate linkage
  modified_base 10: mod_base = OTHER; note = Nucleotide with phosphorothioate linkage
  modified_base 11: mod_base = OTHER; note = Nucleotide with phosphorothioate linkage
  modified_base 12: mod_base = OTHER; note = 5-methylcytosine with phosphorothioate linkage
  modified_base 13: mod_base = OTHER; note = Nucleotide with phosphorothioate linkage
  modified_base 14: mod_base = OTHER; note = Nucleotide with phosphorothioate linkage
  modified_base 15: mod_base = OTHER; note = Nucleotide with phosphorothioate linkage
  modified_base 16: mod_base = OTHER; note = 2'-O-methoxyethyl modified nucleotide with phosphorothioate linkage
  modified_base 17: mod_base = OTHER; note = 2'-O-methoxyethyl modified thymine with phosphorothioate linkage
  modified_base 18: mod_base = OTHER; note = Locked nucleic acid with phosphorothioate linkage
  modified_base 19: mod_base = OTHER; note = 2'-O-methoxyethyl 5-methylcytosine with phosphorothioate linkage
  modified_base 20: mod_base = OTHER; note = 2'-O-methoxyethyl modified nucleotide
  misc_feature 1..5: note = RNA
  misc_feature 6..15: note = DNA
  misc_feature 16..20: note = RNA
cagaggtgaagcgaagtgca

SEQ ID NO: 667 - DNA, 20 bp, synthetic construct
  source 1..20: mol_type = other DNA
  modified_base 1: mod_base = OTHER; note = 2'-O-methoxyethyl 5-methylcytosine with phosphorothioate linkage
  modified_base 2: mod_base = OTHER; note = 2'-O-methoxyethyl modified nucleotide with phosphorothioate linkage
  modified_base 3: mod_base = OTHER; note = Locked nucleic acid with phosphorothioate linkage
  modified_base 4: mod_base = OTHER; note = 2'-O-methoxyethyl modified nucleotide with phosphorothioate linkage
  modified_base 5: mod_base = OTHER; note = 2'-O-methoxyethyl modified nucleotide with phosphorothioate linkage
  modified_base 6: mod_base = OTHER; note = Nucleotide with phosphorothioate linkage
  modified_base 7: mod_base = OTHER; note = Thymine with phosphorothioate linkage
  modified_base 8: mod_base = OTHER; note = Nucleotide with phosphorothioate linkage
  modified_base 9: mod_base = OTHER; note = Nucleotide with phosphorothioate linkage
  modified_base 10: mod_base = OTHER; note = Nucleotide with mesyl phosphoroamidate linkage
  modified_base 11: mod_base = OTHER; note = Nucleotide with phosphorothioate linkage
  modified_base 12: mod_base = OTHER; note = 5-methylcytosine with phosphorothioate linkage
  modified_base 13: mod_base = OTHER; note = Nucleotide with phosphorothioate linkage
  modified_base 14: mod_base = OTHER; note = Nucleotide with phosphorothioate linkage
  modified_base 15: mod_base = OTHER; note = Nucleotide with phosphorothioate linkage
  modified_base 16: mod_base = OTHER; note = 2'-O-methoxyethyl modified nucleotide with phosphorothioate linkage
  modified_base 17: mod_base = OTHER; note = 2'-O-methoxyethyl modified thymine with phosphorothioate linkage
  modified_base 18: mod_base = OTHER; note = Locked nucleic acid with phosphorothioate linkage
  modified_base 19: mod_base = OTHER; note = 2'-O-methoxyethyl 5-methylcytosine with phosphorothioate linkage
  modified_base 20: mod_base = OTHER; note = 2'-O-methoxyethyl modified nucleotide
  misc_feature 1..5: note = RNA
  misc_feature 6..15: note = DNA
  misc_feature 16..20: note = RNA
cagaggtgaagcgaagtgca

SEQ ID NO: 668 - DNA, 20 bp, synthetic construct
  source 1..20: mol_type = other DNA
  modified_base 1: mod_base = OTHER; note = 2'-O-methoxyethyl 5-methylcytosine with phosphorothioate linkage
  modified_base 2: mod_base = OTHER; note = 2'-O-methoxyethyl modified nucleotide with phosphorothioate linkage
  modified_base 3: mod_base = OTHER; note = Locked nucleic acid with phosphorothioate linkage
  modified_base 4: mod_base = OTHER; note = 2'-O-methoxyethyl modified nucleotide with phosphorothioate linkage
  modified_base 5: mod_base = OTHER; note = 2'-O-methoxyethyl modified nucleotide with phosphorothioate linkage
  modified_base 6: mod_base = OTHER; note = Nucleotide with phosphorothioate linkage
  modified_base 7: mod_base = OTHER; note = Thymine with phosphorothioate linkage
  modified_base 8: mod_base = OTHER; note = Nucleotide with phosphorothioate linkage
  modified_base 9: mod_base = OTHER; note = Nucleotide with phosphorothioate linkage
  modified_base 10: mod_base = OTHER; note = Nucleotide with phosphorothioate linkage
  modified_base 11: mod_base = OTHER; note = Nucleotide with mesyl phosphoroamidate linkage
  modified_base 12: mod_base = OTHER; note = 5-methylcytosine with phosphorothioate linkage
  modified_base 13: mod_base = OTHER; note = Nucleotide with phosphorothioate linkage
  modified_base 14: mod_base = OTHER; note = Nucleotide with phosphorothioate linkage
  modified_base 15: mod_base = OTHER; note = Nucleotide with phosphorothioate linkage
  modified_base 16: mod_base = OTHER; note = 2'-O-methoxyethyl modified nucleotide with phosphorothioate linkage
  modified_base 17: mod_base = OTHER; note = 2'-O-methoxyethyl modified thymine with phosphorothioate linkage
  modified_base 18: mod_base = OTHER; note = Locked nucleic acid with phosphorothioate linkage
  modified_base 19: mod_base = OTHER; note = 2'-O-methoxyethyl 5-methylcytosine with phosphorothioate linkage
  modified_base 20: mod_base = OTHER; note = 2'-O-methoxyethyl modified nucleotide
  misc_feature 1..5: note = RNA
  misc_feature 6..15: note = DNA
  misc_feature 16..20: note = RNA
cagaggtgaagcgaagtgca

SEQ ID NO: 669 - DNA, 20 bp, synthetic construct
  source 1..20: mol_type = other DNA
  modified_base 1: mod_base = OTHER; note = 2'-O-methoxyethyl 5-methylcytosine with phosphorothioate linkage
  modified_base 2: mod_base = OTHER; note = 2'-O-methoxyethyl modified nucleotide with phosphorothioate linkage
  modified_base 3: mod_base = OTHER; note = Locked nucleic acid with phosphorothioate linkage
  modified_base 4: mod_base = OTHER; note = 2'-O-methoxyethyl modified nucleotide with phosphorothioate linkage
  modified_base 5: mod_base = OTHER; note = 2'-O-methoxyethyl modified nucleotide with phosphorothioate linkage
  modified_base 6: mod_base = OTHER; note = Nucleotide with phosphorothioate linkage
  modified_base 7: mod_base = OTHER; note = Thymine with phosphorothioate linkage
  modified_base 8: mod_base = OTHER; note = Nucleotide with phosphorothioate linkage
  modified_base 9: mod_base = OTHER; note = Nucleotide with phosphorothioate linkage
  modified_base 10: mod_base = OTHER; note = Nucleotide with phosphorothioate linkage
  modified_base 11: mod_base = OTHER; note = Nucleotide with phosphorothioate linkage
  modified_base 12: mod_base = OTHER; note = 5-methylcytosine with mesyl phosphoroamidate linkage
  modified_base 13: mod_base = OTHER; note = Nucleotide with phosphorothioate linkage
  modified_base 14: mod_base = OTHER; note = Nucleotide with phosphorothioate linkage
  modified_base 15: mod_base = OTHER; note = Nucleotide with phosphorothioate linkage
  modified_base 16: mod_base = OTHER; note = 2'-O-methoxyethyl modified nucleotide with phosphorothioate linkage
  modified_base 17: mod_base = OTHER; note = 2'-O-methoxyethyl modified thymine with phosphorothioate linkage
  modified_base 18: mod_base = OTHER; note = Locked nucleic acid with phosphorothioate linkage
  modified_base 19: mod_base = OTHER; note = 2'-O-methoxyethyl 5-methylcytosine with phosphorothioate linkage
  modified_base 20: mod_base = OTHER; note = 2'-O-methoxyethyl modified nucleotide
  misc_feature 1..5: note = RNA
  misc_feature 6..15: note = DNA
  misc_feature 16..20: note = RNA
cagaggtgaagcgaagtgca

SEQ ID NO: 670 - DNA, 20 bp, synthetic construct
  source 1..20: mol_type = other DNA
  modified_base 1: mod_base = OTHER; note = 2'-O-methoxyethyl 5-methylcytosine with phosphorothioate linkage
  modified_base 2: mod_base = OTHER; note = 2'-O-methoxyethyl modified nucleotide with phosphorothioate linkage
  modified_base 3: mod_base = OTHER; note = Locked nucleic acid with phosphorothioate linkage
  modified_base 4: mod_base = OTHER; note = 2'-O-methoxyethyl modified nucleotide with phosphorothioate linkage
  modified_base 5: mod_base = OTHER; note = 2'-O-methoxyethyl modified nucleotide with phosphorothioate linkage
  modified_base 6: mod_base = OTHER; note = Nucleotide with phosphorothioate linkage
  modified_base 7: mod_base = OTHER; note = Thymine with phosphorothioate linkage
  modified_base 8: mod_base = OTHER; note = Nucleotide with phosphorothioate linkage
  modified_base 9: mod_base = OTHER; note = Nucleotide with phosphorothioate linkage
  modified_base 10: mod_base = OTHER; note = Nucleotide with phosphorothioate linkage
  modified_base 11: mod_base = OTHER; note = Nucleotide with phosphorothioate linkage
  modified_base 12: mod_base = OTHER; note = 5-methylcytosine with phosphorothioate linkage
  modified_base 13: mod_base = OTHER; note = Nucleotide with mesyl phosphoroamidate linkage
  modified_base 14: mod_base = OTHER; note = Nucleotide with phosphorothioate linkage
  modified_base 15: mod_base = OTHER; note = Nucleotide with phosphorothioate linkage
  modified_base 16: mod_base = OTHER; note = 2'-O-methoxyethyl modified nucleotide with phosphorothioate linkage
  modified_base 17: mod_base = OTHER; note = 2'-O-methoxyethyl modified thymine with phosphorothioate linkage
  modified_base 18: mod_base = OTHER; note = Locked nucleic acid with phosphorothioate linkage
  modified_base 19: mod_base = OTHER; note = 2'-O-methoxyethyl 5-methylcytosine with phosphorothioate linkage
  modified_base 20: mod_base = OTHER; note = 2'-O-methoxyethyl modified nucleotide
  misc_feature 1..5: note = RNA
  misc_feature 6..15: note = DNA
  misc_feature 16..20: note = RNA
cagaggtgaagcgaagtgca

SEQ ID NO: 671 - DNA, 20 bp, synthetic construct
  source 1..20: mol_type = other DNA
  modified_base 1: mod_base = OTHER; note = 2'-O-methoxyethyl 5-methylcytosine with phosphorothioate linkage
  modified_base 2: mod_base = OTHER; note = 2'-O-methoxyethyl modified nucleotide with phosphorothioate linkage
  modified_base 3: mod_base = OTHER; note = Locked nucleic acid with phosphorothioate linkage
  modified_base 4: mod_base = OTHER; note = 2'-O-methoxyethyl modified nucleotide with phosphorothioate linkage
  modified_base 5: mod_base = OTHER; note = 2'-O-methoxyethyl modified nucleotide with phosphorothioate linkage
  modified_base 6: mod_base = OTHER; note = Nucleotide with phosphorothioate linkage
  modified_base 7: mod_base = OTHER; note = Thymine with phosphorothioate linkage
  modified_base 8: mod_base = OTHER; note = Nucleotide with phosphorothioate linkage
  modified_base 9: mod_base = OTHER; note = Nucleotide with phosphorothioate linkage
  modified_base 10: mod_base = OTHER; note = Nucleotide with phosphorothioate linkage
  modified_base 11: mod_base = OTHER; note = Nucleotide with phosphorothioate linkage
  modified_base 12: mod_base = OTHER; note = 5-methylcytosine with phosphorothioate linkage
  modified_base 13: mod_base = OTHER; note = Nucleotide with phosphorothioate linkage
  modified_base 14: mod_base = OTHER; note = Nucleotide with mesyl phosphoroamidate linkage
  modified_base 15: mod_base = OTHER; note = Nucleotide with phosphorothioate linkage
  modified_base 16: mod_base = OTHER; note = 2'-O-methoxyethyl modified nucleotide with phosphorothioate linkage
  modified_base 17: mod_base = OTHER; note = 2'-O-methoxyethyl modified thymine with phosphorothioate linkage
  modified_base 18: mod_base = OTHER; note = Locked nucleic acid with phosphorothioate linkage
  modified_base 19: mod_base = OTHER; note = 2'-O-methoxyethyl 5-methylcytosine with phosphorothioate linkage
  modified_base 20: mod_base = OTHER; note = 2'-O-methoxyethyl modified nucleotide
  misc_feature 1..5: note = RNA
  misc_feature 6..15: note = DNA
  misc_feature 16..20: note = RNA
cagaggtgaagcgaagtgca

SEQ ID NO: 672 - DNA, 20 bp, synthetic construct
  source 1..20: mol_type = other DNA
  modified_base 1: mod_base = OTHER; note = 2'-O-methoxyethyl 5-methylcytosine with phosphorothioate linkage
  modified_base 2: mod_base = OTHER; note = 2'-O-methoxyethyl modified nucleotide with phosphorothioate linkage
  modified_base 3: mod_base = OTHER; note = 2'-O-methoxyethyl modified nucleotide with phosphorothioate linkage
  modified_base 4: mod_base = OTHER; note = 2'-O-methoxyethyl modified nucleotide with phosphorothioate linkage
  modified_base 5: mod_base = OTHER; note = 2'-O-methoxyethyl modified nucleotide with phosphorothioate linkage
  modified_base 6: mod_base = OTHER; note = Nucleotide with phosphorothioate linkage
  modified_base 7: mod_base = OTHER; note = Thymine with phosphorothioate linkage
  modified_base 8: mod_base = OTHER; note = Nucleotide with phosphorothioate linkage
  modified_base 9: mod_base = OTHER; note = Nucleotide with phosphorothioate linkage
  modified_base 10: mod_base = OTHER; note = Nucleotide with phosphorothioate linkage
  modified_base 11: mod_base = OTHER; note = Nucleotide with phosphorothioate linkage
  modified_base 12: mod_base = OTHER; note = 5-methylcytosine with phosphorothioate linkage
  modified_base 13: mod_base = OTHER; note = Nucleotide with phosphorothioate linkage
  modified_base 14: mod_base = OTHER; note = Nucleotide with phosphorothioate linkage
  modified_base 15: mod_base = OTHER; note = Nucleotide with phosphorothioate linkage
  modified_base 16: mod_base = OTHER; note = 2'-O-methoxyethyl modified nucleotide with phosphorothioate linkage
  modified_base 17: mod_base = OTHER; note = 2'-O-methoxyethyl modified thymine with phosphorothioate linkage
  modified_base 18: mod_base = OTHER; note = 2'-O-methoxyethyl modified nucleotide with phosphorothioate linkage
  modified_base 19: mod_base = OTHER; note = 2'-O-methoxyethyl 5-methylcytosine with phosphorothioate linkage
  modified_base 20: mod_base = OTHER; note = 2'-O-methoxyethyl modified nucleotide
  misc_feature 1..5: note = RNA
  misc_feature 6..15: note = DNA
  misc_feature 16..20: note = RNA
cagaggtgaagcgaagtgca

SEQ ID NO: 673 - DNA, 20 bp, synthetic construct
  source 1..20: mol_type = other DNA
  modified_base 1: mod_base = OTHER; note = 2'-O-methoxyethyl 5-methylcytosine with phosphorothioate linkage
  modified_base 2: mod_base = OTHER; note = 2'-O-methoxyethyl modified nucleotide with phosphorothioate linkage
  modified_base 3: mod_base = OTHER; note = 2'-O-methoxyethyl modified nucleotide with phosphorothioate linkage
  modified_base 4: mod_base = OTHER; note = 2'-O-methoxyethyl modified nucleotide with phosphorothioate linkage
  modified_base 5: mod_base = OTHER; note = 2'-O-methoxyethyl modified nucleotide with phosphorothioate linkage
  modified_base 6: mod_base = OTHER; note = Nucleotide with phosphorothioate linkage
  modified_base 7: mod_base = OTHER; note = Thymine with phosphorothioate linkage
  modified_base 8: mod_base = OTHER; note = Nucleotide with phosphorothioate linkage
  modified_base 9: mod_base = OTHER; note = Nucleotide with phosphorothioate linkage
  modified_base 10: mod_base = OTHER; note = Nucleotide with phosphorothioate linkage
  modified_base 11: mod_base = OTHER; note = Nucleotide with phosphorothioate linkage
  modified_base 12: mod_base = OTHER; note = 5-methylcytosine with phosphorothioate linkage
  modified_base 13: mod_base = OTHER; note = Nucleotide with phosphorothioate linkage
  modified_base 14: mod_base = OTHER; note = Nucleotide with phosphorothioate linkage
  modified_base 15: mod_base = OTHER; note = Nucleotide with phosphorothioate linkage
  modified_base 16: mod_base = OTHER; note = 2'-O-methoxyethyl modified nucleotide with phosphorothioate linkage
  modified_base 17: mod_base = OTHER; note = 2'-O-methoxyethyl modified thymine with phosphorothioate linkage
  modified_base 18: mod_base = OTHER; note = 2'-O-methoxyethyl modified nucleotide with phosphorothioate linkage
  modified_base 19: mod_base = OTHER; note = 2'-O-methoxyethyl 5-methylcytosine with phosphorothioate linkage
  modified_base 20: mod_base = OTHER; note = 2'-O-methoxyethyl modified nucleotide
  misc_feature 1..5: note = RNA
  misc_feature 6..15: note = DNA
  misc_feature 16..20: note = RNA
cagaggtgaagcgaagtgca

SEQ ID NO: 674 - DNA, 20 bp, synthetic construct
  source 1..20: mol_type = other DNA
  modified_base 1: mod_base = OTHER; note = 2'-O-methoxyethyl 5-methylcytosine with phosphorothioate linkage
  modified_base 2: mod_base = OTHER; note = 2'-O-methoxyethyl modified nucleotide with phosphorothioate linkage
  modified_base 3: mod_base = OTHER; note = 2'-O-methoxyethyl modified nucleotide with phosphorothioate linkage
  modified_base 4: mod_base = OTHER; note = 2'-O-methoxyethyl modified nucleotide with phosphorothioate linkage
  modified_base 5: mod_base = OTHER; note = 2'-O-methoxyethyl modified nucleotide with phosphorothioate linkage
  modified_base 6: mod_base = OTHER; note = Nucleotide with phosphorothioate linkage
  modified_base 7: mod_base = OTHER; note = Thymine with phosphorothioate linkage
  modified_base 8: mod_base = OTHER; note = Nucleotide with phosphorothioate linkage
  modified_base 9: mod_base = OTHER; note = Nucleotide with phosphorothioate linkage
  modified_base 10: mod_base = OTHER; note = Nucleotide with phosphorothioate linkage
  modified_base 11: mod_base = OTHER; note = Nucleotide with phosphorothioate linkage
  modified_base 12: mod_base = OTHER; note = 5-methylcytosine with phosphorothioate linkage
  modified_base 13: mod_base = OTHER; note = Nucleotide with phosphorothioate linkage
  modified_base 14: mod_base = OTHER; note = Nucleotide with phosphorothioate linkage
  modified_base 15: mod_base = OTHER; note = Nucleotide with phosphorothioate linkage
  modified_base 16: mod_base = OTHER; note = 2'-O-methoxyethyl modified nucleotide with phosphorothioate linkage
  modified_base 17: mod_base = OTHER; note = 2'-O-methoxyethyl modified thymine with phosphorothioate linkage
  modified_base 18: mod_base = OTHER; note = 2'-O-methoxyethyl modified nucleotide with phosphorothioate linkage
  modified_base 19: mod_base = OTHER; note = 2'-O-methoxyethyl 5-methylcytosine with phosphorothioate linkage
  modified_base 20: mod_base = OTHER; note = 2'-O-methoxyethyl modified nucleotide
  misc_feature 1..5: note = RNA
  misc_feature 6..15: note = DNA
  misc_feature 16..20: note = RNA
cagaggtgaagcgaagtgca

SEQ ID NO: 675 - DNA, 20 bp, synthetic construct
  source 1..20: mol_type = other DNA
  modified_base 1: mod_base = OTHER; note = 2'-O-methoxyethyl 5-methylcytosine with phosphorothioate linkage
  modified_base 2: mod_base = OTHER; note = 2'-O-methoxyethyl modified nucleotide with phosphorothioate linkage
  modified_base 3: mod_base = OTHER; note = 2'-O-methoxyethyl modified nucleotide with phosphorothioate linkage
  modified_base 4: mod_base = OTHER; note = 2'-O-methoxyethyl modified nucleotide with phosphorothioate linkage
  modified_base 5: mod_base = OTHER; note = 2'-O-methoxyethyl modified nucleotide with phosphorothioate linkage
  modified_base 6: mod_base = OTHER; note = Nucleotide with phosphorothioate linkage
  modified_base 7: mod_base = OTHER; note = Thymine with phosphorothioate linkage
  modified_base 8: mod_base = OTHER; note = Nucleotide with phosphorothioate linkage
  modified_base 9: mod_base = OTHER; note = Nucleotide with phosphorothioate linkage
  modified_base 10: mod_base = OTHER; note = Nucleotide with phosphorothioate linkage
  modified_base 11: mod_base = OTHER; note = Nucleotide with phosphorothioate linkage
  modified_base 12: mod_base = OTHER; note = 5-methylcytosine with phosphorothioate linkage
  modified_base 13: mod_base = OTHER; note = Nucleotide with phosphorothioate linkage
  modified_base 14: mod_base = OTHER; note = Nucleotide with phosphorothioate linkage
  modified_base 15: mod_base = OTHER; note = Nucleotide with phosphorothioate linkage
  modified_base 16: mod_base = OTHER; note = 2'-O-methoxyethyl modified nucleotide with phosphorothioate linkage
  modified_base 17: mod_base = OTHER; note = 2'-O-methoxyethyl modified thymine with phosphorothioate linkage
  modified_base 18: mod_base = OTHER; note = 2'-O-methoxyethyl modified nucleotide with phosphorothioate linkage
  modified_base 19: mod_base = OTHER; note = 2'-O-methoxyethyl 5-methylcytosine with phosphorothioate linkage
  modified_base 20: mod_base = OTHER; note = 2'-O-methoxyethyl modified nucleotide
  misc_feature 1..5: note = RNA
  misc_feature 6..15: note = DNA
  misc_feature 16..20: note = RNA
cagaggtgaagcgaagtgca

SEQ ID NO: 676 - DNA, 20 bp, synthetic construct
  source 1..20: mol_type = other DNA
  modified_base 1: mod_base = OTHER; note = 2'-O-methoxyethyl 5-methylcytosine with phosphorothioate linkage
  modified_base 2: mod_base = OTHER; note = 2'-O-methoxyethyl modified nucleotide with phosphorothioate linkage
  modified_base 3: mod_base = OTHER; note = 2'-O-methoxyethyl modified nucleotide with phosphorothioate linkage
  modified_base 4: mod_base = OTHER; note = 2'-O-methoxyethyl modified nucleotide with phosphorothioate linkage
  modified_base 5: mod_base = OTHER; note = 2'-O-methoxyethyl modified nucleotide with phosphorothioate linkage
  modified_base 6: mod_base = OTHER; note = Nucleotide with phosphorothioate linkage
  modified_base 7: mod_base = OTHER; note = Thymine with phosphorothioate linkage
  modified_base 8: mod_base = OTHER; note = Nucleotide with phosphorothioate linkage
  modified_base 9: mod_base = OTHER; note = Nucleotide with phosphorothioate linkage
  modified_base 10: mod_base = OTHER; note = Nucleotide with phosphorothioate linkage
  modified_base 11: mod_base = OTHER; note = Nucleotide with phosphorothioate linkage
  modified_base 12: mod_base = OTHER; note = 5-methylcytosine with phosphorothioate linkage
  modified_base 13: mod_base = OTHER; note = Nucleotide with phosphorothioate linkage
  modified_base 14: mod_base = OTHER; note = Nucleotide with phosphorothioate linkage
  modified_base 15: mod_base = OTHER; note = Nucleotide with phosphorothioate linkage
  modified_base 16: mod_base = OTHER; note = 2'-O-methoxyethyl modified nucleotide with phosphorothioate linkage
  modified_base 17: mod_base = OTHER; note = 2'-O-methoxyethyl modified thymine with phosphorothioate linkage
  modified_base 18: mod_base = OTHER; note = 2'-O-methoxyethyl modified nucleotide with phosphorothioate linkage
  modified_base 19: mod_base = OTHER; note = 2'-O-methoxyethyl 5-methylcytosine with phosphorothioate linkage
  modified_base 20: mod_base = OTHER; note = 2'-O-methoxyethyl modified nucleotide
  misc_feature 1..5: note = RNA
  misc_feature 6..15: note = DNA
  misc_feature 16..20: note = RNA
cagaggtgaagcgaagtgca

SEQ ID NO: 677 - DNA, 20 bp, synthetic construct
  source 1..20: mol_type = other DNA
  modified_base 1: mod_base = OTHER; note = 2'-O-methoxyethyl 5-methylcytosine attached to N-acetylgalactosamine 4-sulfate with a phosphorothioate linkage
  modified_base 2: mod_base = OTHER; note = 2'-O-methoxyethyl modified nucleotide with phosphorothioate linkage
  modified_base 3: mod_base = OTHER; note = 2'-O-methoxyethyl modified nucleotide with phosphorothioate linkage
  modified_base 4: mod_base = OTHER; note = 2'-O-methoxyethyl modified nucleotide with phosphorothioate linkage
  modified_base 5: mod_base = OTHER; note = 2'-O-methoxyethyl modified nucleotide with phosphorothioate linkage
  modified_base 6: mod_base = OTHER; note = Nucleotide with phosphorothioate linkage
  modified_base 7: mod_base = OTHER; note = Thymine with phosphorothioate linkage
  modified_base 8: mod_base = OTHER; note = Nucleotide with phosphorothioate linkage
  modified_base 9: mod_base = OTHER; note = Nucleotide with phosphorothioate linkage
  modified_base 10: mod_base = OTHER; note = Nucleotide with phosphorothioate linkage
  modified_base 11: mod_base = OTHER; note = Nucleotide with phosphorothioate linkage
  modified_base 12: mod_base = OTHER; note = 5-methylcytosine with phosphorothioate linkage
  modified_base 13: mod_base = OTHER; note = Nucleotide with phosphorothioate linkage
  modified_base 14: mod_base = OTHER; note = Nucleotide with phosphorothioate linkage
  modified_base 15: mod_base = OTHER; note = Nucleotide with phosphorothioate linkage
  modified_base 16: mod_base = OTHER; note = 2'-O-methoxyethyl modified nucleotide with phosphorothioate linkage
  modified_base 17: mod_base = OTHER; note = 2'-O-methoxyethyl modified thymine with phosphorothioate linkage
  modified_base 18: mod_base = OTHER; note = 2'-O-methoxyethyl modified nucleotide with phosphorothioate linkage
  modified_base 19: mod_base = OTHER; note = 2'-O-methoxyethyl 5-methylcytosine with phosphorothioate linkage
  modified_base 20: mod_base = OTHER; note = 2'-O-methoxyethyl modified nucleotide
  misc_feature 1..5: note = RNA
  misc_feature 6..15: note = DNA
  misc_feature 16..20: note = RNA
cagaggtgaagcgaagtgca

SEQ ID NO: 678 - DNA, 20 bp, synthetic construct
  source 1..20: mol_type = other DNA
  modified_base 1: mod_base = OTHER; note = 2'-O-methoxyethyl 5-methylcytosine attached to N-acetylgalactosamine 4-sulfate with a phosphorothioate linkage
  modified_base 2: mod_base = OTHER; note = 2'-O-methoxyethyl modified nucleotide with phosphorothioate linkage
  modified_base 3: mod_base = OTHER; note = 2'-O-methoxyethyl modified nucleotide with phosphorothioate linkage
  modified_base 4: mod_base = OTHER; note = 2'-O-methoxyethyl modified nucleotide with phosphorothioate linkage
  modified_base 5: mod_base = OTHER; note = 2'-O-methoxyethyl modified nucleotide with phosphorothioate linkage
  modified_base 6: mod_base = OTHER; note = Nucleotide with phosphorothioate linkage
  modified_base 7: mod_base = OTHER; note = Thymine with phosphorothioate linkage
  modified_base 8: mod_base = OTHER; note = Nucleotide with phosphorothioate linkage
  modified_base 9: mod_base = OTHER; note = Nucleotide with phosphorothioate linkage
  modified_base 10: mod_base = OTHER; note = Nucleotide with phosphorothioate linkage
  modified_base 11: mod_base = OTHER; note = Nucleotide with phosphorothioate linkage
  modified_base 12: mod_base = OTHER; note = 5-methylcytosine with phosphorothioate linkage
  modified_base 13: mod_base = OTHER; note = Nucleotide with phosphorothioate linkage
  modified_base 14: mod_base = OTHER; note = Nucleotide with phosphorothioate linkage
  modified_base 15: mod_base = OTHER; note = Nucleotide with phosphorothioate linkage
  modified_base 16: mod_base = OTHER; note = 2'-O-methoxyethyl modified nucleotide with phosphorothioate linkage
  modified_base 17: mod_base = OTHER; note = 2'-O-methoxyethyl modified thymine with phosphorothioate linkage
  modified_base 18: mod_base = OTHER; note = 2'-O-methoxyethyl modified nucleotide with phosphorothioate linkage
  modified_base 19: mod_base = OTHER; note = 2'-O-methoxyethyl 5-methylcytosine with phosphorothioate linkage
  modified_base 20: mod_base = OTHER; note = 2'-O-methoxyethyl modified nucleotide
  misc_feature 1..5: note = RNA
  misc_feature 6..15: note = DNA
  misc_feature 16..20: note = RNA
cagaggtgaagcgaagtgca

SEQ ID NO: 679 - DNA, 20 bp, synthetic construct
  source 1..20: mol_type = other DNA
  modified_base 1: mod_base = OTHER; note = 2'-O-methoxyethyl 5-methylcytosine with phosphorothioate linkage
  modified_base 2: mod_base = OTHER; note = 2'-O-methoxyethyl modified nucleotide with phosphorothioate linkage
  modified_base 3: mod_base = OTHER; note = Locked nucleic acid with phosphorothioate linkage
  modified_base 4: mod_base = OTHER; note = 2'-O-methoxyethyl modified nucleotide with phosphorothioate linkage
  modified_base 5: mod_base = OTHER; note = Locked nucleic acid with phosphorothioate linkage
  modified_base 6: mod_base = OTHER; note = 5-O-cyclopropyl modified nucleotide with phosphorothioate linkage
  modified_base 7: mod_base = OTHER; note = Thymine with phosphorothioate linkage
  modified_base 8: mod_base = OTHER; note = Nucleotide with phosphorothioate linkage
  modified_base 9: mod_base = OTHER; note = Nucleotide with phosphorothioate linkage
  modified_base 10: mod_base = OTHER; note = Nucleotide with phosphorothioate linkage
  modified_base 11: mod_base = OTHER; note = Nucleotide with phosphorothioate linkage
  modified_base 12: mod_base = OTHER; note = 5-methylcytosine with phosphorothioate linkage
  modified_base 13: mod_base = OTHER; note = Nucleotide with phosphorothioate linkage
  modified_base 14: mod_base = OTHER; note = Nucleotide with phosphorothioate linkage
  modified_base 15: mod_base = OTHER; note = Nucleotide with phosphorothioate linkage
  modified_base 16: mod_base = OTHER; note = 2'-O-methoxyethyl modified nucleotide with phosphorothioate linkage
  modified_base 17: mod_base = OTHER; note = 2'-O-methoxyethyl modified thymine with phosphorothioate linkage
  modified_base 18: mod_base = OTHER; note = 2'-O-methoxyethyl modified nucleotide with phosphorothioate linkage
  modified_base 19: mod_base = OTHER; note = 2'-O-methoxyethyl 5-methylcytosine with phosphorothioate linkage
  modified_base 20: mod_base = OTHER; note = 2'-O-methoxyethyl modified nucleotide
  misc_feature 1..6: note = RNA
  misc_feature 7..15: note = DNA
  misc_feature 16..20: note = RNA
cagaggtgaagcgaagtgca

SEQ ID NO: 680 - DNA, 20 bp, synthetic construct
  source 1..20: mol_type = other DNA
  modified_base 1: mod_base = OTHER; note = 2'-O-methoxyethyl 5-methylcytosine with phosphorothioate linkage
  modified_base 2: mod_base = OTHER; note = 2'-O-methoxyethyl modified nucleotide with phosphorothioate linkage
  modified_base 3: mod_base = OTHER; note = Locked nucleic acid with phosphorothioate linkage
  modified_base 4: mod_base = OTHER; note = 2'-O-methoxyethyl modified nucleotide with phosphorothioate linkage
  modified_base 5: mod_base = OTHER; note = Locked nucleic acid with phosphorothioate linkage
  modified_base 6: mod_base = OTHER; note = 5-O-methylcyclopropyl modified nucleotide with phosphorothioate linkage
  modified_base 7: mod_base = OTHER; note = Thymine with phosphorothioate linkage
  modified_base 8: mod_base = OTHER; note = Nucleotide with phosphorothioate linkage
  modified_base 9: mod_base = OTHER; note = Nucleotide with phosphorothioate linkage
  modified_base 10: mod_base = OTHER; note = Nucleotide with phosphorothioate linkage
  modified_base 11: mod_base = OTHER; note = Nucleotide with phosphorothioate linkage
  modified_base 12: mod_base = OTHER; note = 5-methylcytosine with phosphorothioate linkage
  modified_base 13: mod_base = OTHER; note = Nucleotide with phosphorothioate linkage
  modified_base 14: mod_base = OTHER; note = Nucleotide with phosphorothioate linkage
  modified_base 15: mod_base = OTHER; note = Nucleotide with phosphorothioate linkage
  modified_base 16: mod_base = OTHER; note = 2'-O-methoxyethyl modified nucleotide with phosphorothioate linkage
  modified_base 17: mod_base = OTHER; note = 2'-O-methoxyethyl modified thymine with phosphorothioate linkage
  modified_base 18: mod_base = OTHER; note = 2'-O-methoxyethyl modified nucleotide with phosphorothioate linkage
  modified_base 19: mod_base = OTHER; note = 2'-O-methoxyethyl 5-methylcytosine with phosphorothioate linkage
  modified_base 20: mod_base = OTHER; note = 2'-O-methoxyethyl modified nucleotide
  misc_feature 1..6: note = RNA
  misc_feature 7..15: note = DNA
  misc_feature 16..20: note = RNA
cagaggtgaagcgaagtgca

SEQ ID NO: 681 - DNA, 20 bp, synthetic construct
  source 1..20: mol_type = other DNA
  modified_base 1: mod_base = OTHER; note = 2'-O-methoxyethyl 5-methylcytosine with phosphorothioate linkage
  modified_base 2: mod_base = OTHER; note = 2'-O-methoxyethyl modified nucleotide with phosphorothioate linkage
  modified_base 3: mod_base = OTHER; note = Locked nucleic acid with phosphorothioate linkage
  modified_base 4: mod_base = OTHER; note = 2'-O-methoxyethyl modified nucleotide with phosphorothioate linkage
  modified_base 5: mod_base = OTHER; note = Locked nucleic acid with phosphorothioate linkage
  modified_base 6: mod_base = OTHER; note = Nucleotide with phosphorothioate linkage
  modified_base 7: mod_base = OTHER; note = Thymine with phosphorothioate linkage
  modified_base 8: mod_base = OTHER; note = 5-O-cyclopropyl modified nucleotide with phosphorothioate linkage
  modified_base 9: mod_base = OTHER; note = Nucleotide with phosphorothioate linkage
  modified_base 10: mod_base = OTHER; note = Nucleotide with phosphorothioate linkage
  modified_base 11: mod_base = OTHER; note = Nucleotide with phosphorothioate linkage
  modified_base 12: mod_base = OTHER; note = 5-methylcytosine with phosphorothioate linkage
  modified_base 13: mod_base = OTHER; note = Nucleotide with phosphorothioate linkage
  modified_base 14: mod_base = OTHER; note = Nucleotide with phosphorothioate linkage
  modified_base 15: mod_base = OTHER; note = Nucleotide with phosphorothioate linkage
  modified_base 16: mod_base = OTHER; note = 2'-O-methoxyethyl modified nucleotide with phosphorothioate linkage
  modified_base 17: mod_base = OTHER; note = 2'-O-methoxyethyl modified thymine with phosphorothioate linkage
  modified_base 18: mod_base = OTHER; note = 2'-O-methoxyethyl modified nucleotide with phosphorothioate linkage
  modified_base 19: mod_base = OTHER; note = 2'-O-methoxyethyl 5-methylcytosine with phosphorothioate linkage
  modified_base 20: mod_base = OTHER; note = 2'-O-methoxyethyl modified nucleotide
  misc_feature 1..5: note = RNA
  misc_feature 6..7: note = DNA
  misc_feature 8: note = RNA
  misc_feature 9..15: note = DNA
  misc_feature 16..20: note = RNA
cagaggtgaagcgaagtgca

SEQ ID NO: 682 - DNA, 20 bp, synthetic construct
  source 1..20: mol_type = other DNA
  modified_base 1: mod_base = OTHER; note = 2'-O-methoxyethyl 5-methylcytosine with phosphorothioate linkage
  modified_base 2: mod_base = OTHER; note = 2'-O-methoxyethyl modified nucleotide with phosphorothioate linkage
  modified_base 3: mod_base = OTHER; note = Locked nucleic acid with phosphorothioate linkage
  modified_base 4: mod_base = OTHER; note = 2'-O-methoxyethyl modified nucleotide with phosphorothioate linkage
  modified_base 5: mod_base = OTHER; note = Locked nucleic acid with phosphorothioate linkage
  modified_base 6: mod_base = OTHER; note = Nucleotide with phosphorothioate linkage
  modified_base 7: mod_base = OTHER; note = Thymine with phosphorothioate linkage
  modified_base 8: mod_base = OTHER; note = 5-O-methylcyclopropyl modified nucleotide with phosphorothioate linkage
  modified_base 9: mod_base = OTHER; note = Nucleotide with phosphorothioate linkage
  modified_base 10: mod_base = OTHER; note = Nucleotide with phosphorothioate linkage
  modified_base 11: mod_base = OTHER; note = Nucleotide with phosphorothioate linkage
  modified_base 12: mod_base = OTHER; note = 5-methylcytosine with phosphorothioate linkage
  modified_base 13: mod_base = OTHER; note = Nucleotide with phosphorothioate linkage
  modified_base 14: mod_base = OTHER; note = Nucleotide with phosphorothioate linkage
  modified_base 15: mod_base = OTHER; note = Nucleotide with phosphorothioate linkage
  modified_base 16: mod_base = OTHER; note = 2'-O-methoxyethyl modified nucleotide with phosphorothioate linkage
  modified_base 17: mod_base = OTHER; note = 2'-O-methoxyethyl modified thymine with phosphorothioate linkage
  modified_base 18: mod_base = OTHER; note = 2'-O-methoxyethyl modified nucleotide with phosphorothioate linkage
  modified_base 19: mod_base = OTHER; note = 2'-O-methoxyethyl 5-methylcytosine with phosphorothioate linkage
  modified_base 20: mod_base = OTHER; note = 2'-O-methoxyethyl modified nucleotide
  misc_feature 1..5: note = RNA
  misc_feature 6..7: note = DNA
  misc_feature 8: note = RNA
  misc_feature 9..15: note = DNA
  misc_feature 16..20: note = RNA
cagaggtgaagcgaagtgca

SEQ ID NO: 683 - DNA, 20 bp, synthetic construct
  source 1..20: mol_type = other DNA
  modified_base 1: mod_base = OTHER; note = 2'-O-methoxyethyl 5-methylcytosine with phosphorothioate linkage
  modified_base 2: mod_base = OTHER; note = 2'-O-methoxyethyl modified nucleotide with phosphorothioate linkage
  modified_base 3: mod_base = OTHER; note = Locked nucleic acid with phosphorothioate linkage
  modified_base 4: mod_base = OTHER; note = 2'-O-methoxyethyl modified nucleotide with phosphorothioate linkage
  modified_base 5: mod_base = OTHER; note = 2'-O-methoxyethyl modified nucleotide with phosphorothioate linkage
  modified_base 6: mod_base = OTHER; note = 5-O-cyclopropyl modified nucleotide with phosphorothioate linkage
  modified_base 7: mod_base = OTHER; note = Thymine with phosphorothioate linkage
  modified_base 8: mod_base = OTHER; note = Nucleotide with phosphorothioate linkage
  modified_base 9: mod_base = OTHER; note = Nucleotide with phosphorothioate linkage
  modified_base 10: mod_base = OTHER; note = Nucleotide with phosphorothioate linkage
  modified_base 11: mod_base = OTHER; note = Nucleotide with phosphorothioate linkage
  modified_base 12: mod_base = OTHER; note = 5-methylcytosine with phosphorothioate linkage
  modified_base 13: mod_base = OTHER; note = Nucleotide with phosphorothioate linkage
  modified_base 14: mod_base = OTHER; note = Nucleotide with phosphorothioate linkage
  modified_base 15: mod_base = OTHER; note = Nucleotide with phosphorothioate linkage
  modified_base 16: mod_base = OTHER; note = 2'-O-methoxyethyl modified nucleotide with phosphorothioate linkage
  modified_base 17: mod_base = OTHER; note = 2'-O-methoxyethyl modified thymine with phosphorothioate linkage
  modified_base 18: mod_base = OTHER; note = Locked nucleic acid with phosphorothioate linkage
  modified_base 19: mod_base = OTHER; note = 2'-O-methoxyethyl 5-methylcytosine with phosphorothioate linkage
  modified_base 20: mod_base = OTHER; note = 2'-O-methoxyethyl modified nucleotide
  misc_feature 1..6: note = RNA
  misc_feature 7..15: note = DNA
  misc_feature 16..20: note = RNA
cagaggtgaagcgaagtgca

SEQ ID NO: 684 - DNA, 20 bp, synthetic construct
  source 1..20: mol_type = other DNA
  modified_base 1: mod_base = OTHER; note = 2'-O-methoxyethyl 5-methylcytosine with phosphorothioate linkage
  modified_base 2: mod_base = OTHER; note = 2'-O-methoxyethyl modified nucleotide with phosphorothioate linkage
  modified_base 3: mod_base = OTHER; note = Locked nucleic acid with phosphorothioate linkage
  modified_base 4: mod_base = OTHER; note = 2'-O-methoxyethyl modified nucleotide with phosphorothioate linkage
  modified_base 5: mod_base = OTHER; note = 2'-O-methoxyethyl modified nucleotide with phosphorothioate linkage
  modified_base 6: mod_base = OTHER; note = 5-O-methylcyclopropyl modified nucleotide with phosphorothioate linkage
  modified_base 7: mod_base = OTHER; note = Thymine with phosphorothioate linkage
  modified_base 8: mod_base = OTHER; note = Nucleotide with phosphorothioate linkage
  modified_base 9: mod_base = OTHER; note = Nucleotide with phosphorothioate linkage
  modified_base 10: mod_base = OTHER; note = Nucleotide with phosphorothioate linkage
  modified_base 11: mod_base = OTHER; note = Nucleotide with phosphorothioate linkage
  modified_base 12: mod_base = OTHER; note = 5-methylcytosine with phosphorothioate linkage
  modified_base 13: mod_base = OTHER; note = Nucleotide with phosphorothioate linkage
  modified_base 14: mod_base = OTHER; note = Nucleotide with phosphorothioate linkage
  modified_base 15: mod_base = OTHER; note = Nucleotide with phosphorothioate linkage
  modified_base 16: mod_base = OTHER; note = 2'-O-methoxyethyl modified nucleotide with phosphorothioate linkage
  modified_base 17: mod_base = OTHER; note = 2'-O-methoxyethyl modified thymine with phosphorothioate linkage
  modified_base 18: mod_base = OTHER; note = Locked nucleic acid with phosphorothioate linkage
  modified_base 19: mod_base = OTHER; note = 2'-O-methoxyethyl 5-methylcytosine with phosphorothioate linkage
  modified_base 20: mod_base = OTHER; note = 2'-O-methoxyethyl modified nucleotide
  misc_feature 1..6: note = RNA
  misc_feature 7..15: note = DNA
  misc_feature 16..20: note = RNA
cagaggtgaagcgaagtgca

SEQ ID NO: 685 - DNA, 20 bp, synthetic construct
  source 1..20: mol_type = other DNA
  modified_base 1: mod_base = OTHER; note = 2'-O-methoxyethyl 5-methylcytosine with phosphorothioate linkage
  modified_base 2: mod_base = OTHER; note = 2'-O-methoxyethyl modified nucleotide with phosphorothioate linkage
  modified_base 3: mod_base = OTHER; note = Locked nucleic acid with phosphorothioate linkage
  modified_base 4: mod_base = OTHER; note = 2'-O-methoxyethyl modified nucleotide with phosphorothioate linkage
  modified_base 5: mod_base = OTHER; note = 2'-O-methoxyethyl modified nucleotide with phosphorothioate linkage
  modified_base 6: mod_base = OTHER; note = Nucleotide with phosphorothioate linkage
  modified_base 7: mod_base = OTHER; note = Thymine with phosphorothioate linkage
  modified_base 8: mod_base = OTHER; note = 5-O-cyclopropyl modified nucleotide with phosphorothioate linkage
  modified_base 9: mod_base = OTHER; note = Nucleotide with phosphorothioate linkage
  modified_base 10: mod_base = OTHER; note = Nucleotide with phosphorothioate linkage
  modified_base 11: mod_base = OTHER; note = Nucleotide with phosphorothioate linkage
  modified_base 12: mod_base = OTHER; note = 5-methylcytosine with phosphorothioate linkage
  modified_base 13: mod_base = OTHER; note = Nucleotide with phosphorothioate linkage
  modified_base 14: mod_base = OTHER; note = Nucleotide with phosphorothioate linkage
  modified_base 15: mod_base = OTHER; note = Nucleotide with phosphorothioate linkage
  modified_base 16: mod_base = OTHER; note = 2'-O-methoxyethyl modified nucleotide with phosphorothioate linkage
  modified_base 17: mod_base = OTHER; note = 2'-O-methoxyethyl modified thymine with phosphorothioate linkage
  modified_base 18: mod_base = OTHER; note = Locked nucleic acid with phosphorothioate linkage
  modified_base 19: mod_base = OTHER; note = 2'-O-methoxyethyl 5-methylcytosine with phosphorothioate linkage
  modified_base 20: mod_base = OTHER; note = 2'-O-methoxyethyl modified nucleotide
  misc_feature 1..5: note = RNA
  misc_feature 6..7: note = DNA
  misc_feature 8: note = RNA
  misc_feature 9..15: note = DNA
  misc_feature 16..20: note = RNA
cagaggtgaagcgaagtgca

SEQ ID NO: 686 - DNA, 20 bp, synthetic construct
  source 1..20: mol_type = other DNA
  modified_base 1: mod_base = OTHER; note = 2'-O-methoxyethyl 5-methylcytosine with phosphorothioate linkage
  modified_base 2: mod_base = OTHER; note = 2'-O-methoxyethyl modified nucleotide with phosphorothioate linkage
  modified_base 3: mod_base = OTHER; note = Locked nucleic acid with phosphorothioate linkage
  modified_base 4: mod_base = OTHER; note = 2'-O-methoxyethyl modified nucleotide with phosphorothioate linkage
  modified_base 5: mod_base = OTHER; note = 2'-O-methoxyethyl modified nucleotide with phosphorothioate linkage
  modified_base 6: mod_base = OTHER; note = Nucleotide with phosphorothioate linkage
  modified_base 7: mod_base = OTHER; note = Thymine with phosphorothioate linkage
  modified_base 8: mod_base = OTHER; note = 5-O-methylcyclopropyl modified nucleotide with phosphorothioate linkage
  modified_base 9: mod_base = OTHER; note = Nucleotide with phosphorothioate linkage
  modified_base 10: mod_base = OTHER; note = Nucleotide with phosphorothioate linkage
  modified_base 11: mod_base = OTHER; note = Nucleotide with phosphorothioate linkage
  modified_base 12: mod_base = OTHER; note = 5-methylcytosine with phosphorothioate linkage
  modified_base 13: mod_base = OTHER; note = Nucleotide with phosphorothioate linkage
  modified_base 14: mod_base = OTHER; note = Nucleotide with phosphorothioate linkage
  modified_base 15: mod_base = OTHER; note = Nucleotide with phosphorothioate linkage
  modified_base 16: mod_base = OTHER; note = 2'-O-methoxyethyl modified nucleotide with phosphorothioate linkage
  modified_base 17: mod_base = OTHER; note = 2'-O-methoxyethyl modified thymine with phosphorothioate linkage
  modified_base 18: mod_base = OTHER; note = Locked nucleic acid with phosphorothioate linkage
  modified_base 19: mod_base = OTHER; note = 2'-O-methoxyethyl 5-methylcytosine with phosphorothioate linkage
  modified_base 20: mod_base = OTHER; note = 2'-O-methoxyethyl modified nucleotide
  misc_feature 1..5: note = RNA
  misc_feature 6..7: note = DNA
  misc_feature 8: note = RNA
  misc_feature 9..15: note = DNA
  misc_feature 16..20: note = RNA
cagaggtgaagcgaagtgca

SEQ ID NO: 687 - DNA, 20 bp, synthetic construct
  source 1..20: mol_type = other DNA
  modified_base 1: mod_base = OTHER; note = 2'-O-methoxyethyl modified nucleotide with phosphorothioate linkage
  modified_base 2: mod_base = OTHER; note = 2'-O-methoxyethyl modified nucleotide with phosphorothioate linkage
  modified_base 3: mod_base = OTHER; note = Locked nucleic acid with phosphorothioate linkage
  modified_base 4: mod_base = OTHER; note = 2'-O-methoxyethyl modified thymine with phosphorothioate linkage
  modified_base 5: mod_base = OTHER; note = Locked nucleic acid with phosphorothioate linkage
  modified_base 6: mod_base = OTHER; note = Nucleotide with phosphorothioate linkage
  modified_base 7: mod_base = OTHER; note = Nucleotide with phosphorothioate linkage
  modified_base 8: mod_base = OTHER; note = 5-O-cyclopropyl modified nucleotide with phosphorothioate linkage
  modified_base 9: mod_base = OTHER; note = 5-methylcytosine with phosphorothioate linkage
  modified_base 10: mod_base = OTHER; note = Nucleotide with phosphorothioate linkage
  modified_base 11: mod_base = OTHER; note = Nucleotide with phosphorothioate linkage
  modified_base 12: mod_base = OTHER; note = Nucleotide with phosphorothioate linkage
  modified_base 13: mod_base = OTHER; note = Nucleotide with phosphorothioate linkage
  modified_base 14: mod_base = OTHER; note = Thymine with phosphorothioate linkage
  modified_base 15: mod_base = OTHER; note = Nucleotide with phosphorothioate linkage
  modified_base 16: mod_base = OTHER; note = 2'-O-methoxyethyl 5-methylcytosine with phosphorothioate linkage
  modified_base 17: mod_base = OTHER; note = 2'-O-methoxyethyl modified nucleotide with phosphorothioate linkage
  modified_base 18: mod_base = OTHER; note = 2'-O-methoxyethyl 5-methylcytosine with phosphorothioate linkage
  modified_base 19: mod_base = OTHER; note = 2'-O-methoxyethyl modified nucleotide with phosphorothioate linkage
  modified_base 20: mod_base = OTHER; note = 2'-O-methoxyethyl 5-methylcytosine
  misc_feature 1..5: note = RNA
  misc_feature 6..7: note = DNA
  misc_feature 8: note = RNA
  misc_feature 9..15: note = DNA
  misc_feature 16..20: note = RNA
aggtgaagcgaagtgcacac

SEQ ID NO: 688 - DNA, 20 bp, synthetic construct
  source 1..20: mol_type = other DNA
  modified_base 1: mod_base = OTHER; note = 2'-O-methoxyethyl modified nucleotide with phosphorothioate linkage
  modified_base 2: mod_base = OTHER; note = 2'-O-methoxyethyl modified nucleotide with phosphorothioate linkage
  modified_base 3: mod_base = OTHER; note = Locked nucleic acid with phosphorothioate linkage
  modified_base 4: mod_base = OTHER; note = 2'-O-methoxyethyl modified thymine with phosphorothioate linkage
  modified_base 5: mod_base = OTHER; note = Locked nucleic acid with phosphorothioate linkage
  modified_base 6: mod_base = OTHER; note = Nucleotide with phosphorothioate linkage
  modified_base 7: mod_base = OTHER; note = Nucleotide with phosphorothioate linkage
  modified_base 8: mod_base = OTHER; note = 5-O-methylcyclopropyl modified nucleotide with phosphorothioate linkage
  modified_base 9: mod_base = OTHER; note = 5-methylcytosine with phosphorothioate linkage
  modified_base 10: mod_base = OTHER; note = Nucleotide with phosphorothioate linkage
  modified_base 11: mod_base = OTHER; note = Nucleotide with phosphorothioate linkage
  modified_base 12: mod_base = OTHER; note = Nucleotide with phosphorothioate linkage
  modified_base 13: mod_base = OTHER; note = Nucleotide with phosphorothioate linkage
  modified_base 14: mod_base = OTHER; note = Thymine with phosphorothioate linkage
  modified_base 15: mod_base = OTHER; note = Nucleotide with phosphorothioate linkage
  modified_base 16: mod_base = OTHER; note = 2'-O-methoxyethyl 5-methylcytosine with phosphorothioate linkage
  modified_base 17: mod_base = OTHER; note = 2'-O-methoxyethyl modified nucleotide with phosphorothioate linkage
  modified_base 18: mod_base = OTHER; note = 2'-O-methoxyethyl 5-methylcytosine with phosphorothioate linkage
  modified_base 19: mod_base = OTHER; note = 2'-O-methoxyethyl modified nucleotide with phosphorothioate linkage
  modified_base 20: mod_base = OTHER; note = 2'-O-methoxyethyl 5-methylcytosine
  misc_feature 1..5: note = RNA
  misc_feature 6..7: note = DNA
  misc_feature 8: note = RNA
  misc_feature 9..15: note = DNA
  misc_feature 16..20: note = RNA
aggtgaagcgaagtgcacac

SEQ ID NO: 689 - DNA, 20 bp, synthetic construct
  source 1..20: mol_type = other DNA
  modified_base 1: mod_base = OTHER; note = 2'-O-methoxyethyl 5-methylcytosine with phosphorothioate linkage
  modified_base 2: mod_base = OTHER; note = 2'-O-methoxyethyl modified nucleotide with phosphorothioate linkage
  modified_base 3: mod_base = OTHER; note = Locked nucleic acid with phosphorothioate linkage
  modified_base 4: mod_base = OTHER; note = 2'-O-methoxyethyl modified nucleotide with phosphorothioate linkage
  modified_base 5: mod_base = OTHER; note = Nucleotide with phosphorothioate linkage
  modified_base 6: mod_base = OTHER; note = Nucleotide with phosphorothioate linkage
  modified_base 7: mod_base = OTHER; note = Thymine with phosphorothioate linkage
  modified_base 8: mod_base = OTHER; note = Nucleotide with phosphorothioate linkage
  modified_base 9: mod_base = OTHER; note = Nucleotide with phosphorothioate linkage
  modified_base 10: mod_base = OTHER; note = Nucleotide with phosphorothioate linkage
  modified_base 11: mod_base = OTHER; note = Nucleotide with phosphorothioate linkage
  modified_base 12: mod_base = OTHER; note = 5-methylcytosine with phosphorothioate linkage
  modified_base 13: mod_base = OTHER; note = Nucleotide with phosphorothioate linkage
  modified_base 14: mod_base = OTHER; note = Nucleotide with phosphorothioate linkage
  modified_base 15: mod_base = OTHER; note = Nucleotide with phosphorothioate linkage
  modified_base 16: mod_base = OTHER; note = 2'-O-methoxyethyl modified nucleotide with phosphorothioate linkage
  modified_base 17: mod_base = OTHER; note = 2'-O-methoxyethyl modified thymine with phosphorothioate linkage
  modified_base 18: mod_base = OTHER; note = Locked nucleic acid with phosphorothioate linkage
  modified_base 19: mod_base = OTHER; note = 2'-O-methoxyethyl 5-methylcytosine with phosphorothioate linkage
  modified_base 20: mod_base = OTHER; note = 2'-O-methoxyethyl modified nucleotide
  misc_feature 1..4: note = RNA
  misc_feature 5..15: note = DNA
  misc_feature 16..20: note = RNA
cagaggtgaagcgaagtgca

SEQ ID NO: 690 - DNA, 20 bp, synthetic construct
  source 1..20: mol_type = other DNA
  modified_base 1: mod_base = OTHER; note = 2'-O-methoxyethyl 5-methylcytosine with phosphorothioate linkage
  modified_base 2: mod_base = OTHER; note = 2'-O-methoxyethyl modified nucleotide with phosphorothioate linkage
  modified_base 3: mod_base = OTHER; note = Locked nucleic acid with phosphorothioate linkage
  modified_base 4: mod_base = OTHER; note = 2'-O-methoxyethyl modified nucleotide with phosphorothioate linkage
  modified_base 5: mod_base = OTHER; note = 2'-O-methoxyethyl modified nucleotide with phosphorothioate linkage
  modified_base 6: mod_base = OTHER; note = Nucleotide with phosphorothioate linkage
  modified_base 7: mod_base = OTHER; note = Thymine with phosphorothioate linkage
  modified_base 8: mod_base = OTHER; note = Nucleotide with phosphorothioate linkage
  modified_base 9: mod_base = OTHER; note = Nucleotide with phosphorothioate linkage
  modified_base 10: mod_base = OTHER; note = Nucleotide with phosphorothioate linkage
  modified_base 11: mod_base = OTHER; note = Nucleotide with phosphorothioate linkage
  modified_base 12: mod_base = OTHER; note = 5-methylcytosine with phosphorothioate linkage
  modified_base 13: mod_base = OTHER; note = Nucleotide with phosphorothioate linkage
  modified_base 14: mod_base = OTHER; note = Nucleotide with phosphorothioate linkage
  modified_base 15: mod_base = OTHER; note = Nucleotide with phosphorothioate linkage
  modified_base 16: mod_base = OTHER; note = Nucleotide with phosphorothioate linkage
  modified_base 17: mod_base = OTHER; note = 2'-O-methoxyethyl modified thymine with phosphorothioate linkage
  modified_base 18: mod_base = OTHER; note = Locked nucleic acid with phosphorothioate linkage
  modified_base 19: mod_base = OTHER; note = 2'-O-methoxyethyl 5-methylcytosine with phosphorothioate linkage
  modified_base 20: mod_base = OTHER; note = 2'-O-methoxyethyl modified nucleotide
  misc_feature 1..5: note = RNA
  misc_feature 6..16: note = DNA
  misc_feature 17..20: note = RNA
cagaggtgaagcgaagtgca

SEQ ID NO: 691 - DNA, 20 bp, synthetic construct
  source 1..20: mol_type = other DNA
  modified_base 1: mod_base = OTHER; note = 2'-O-methoxyethyl 5-methylcytosine with phosphorothioate linkage
  modified_base 2: mod_base = OTHER; note = 2'-O-methoxyethyl modified nucleotide with phosphorothioate linkage
  modified_base 3: mod_base = OTHER; note = Locked nucleic acid with phosphorothioate linkage
  modified_base 4: mod_base = OTHER; note = 2'-O-methoxyethyl modified nucleotide with phosphorothioate linkage
  modified_base 5: mod_base = OTHER; note = 2'-O-methoxyethyl modified nucleotide with phosphorothioate linkage
  modified_base 6: mod_base = OTHER; note = 2'-O-methoxyethyl modified nucleotide with phosphorothioate linkage
  modified_base 7: mod_base = OTHER; note = Thymine with phosphorothioate linkage
  modified_base 8: mod_base = OTHER; note = Nucleotide with phosphorothioate linkage
  modified_base 9: mod_base = OTHER; note = Nucleotide with phosphorothioate linkage
  modified_base 10: mod_base = OTHER; note = Nucleotide with phosphorothioate linkage
  modified_base 11: mod_base = OTHER; note = Nucleotide with phosphorothioate linkage
  modified_base 12: mod_base = OTHER; note = 5-methylcytosine with phosphorothioate linkage
  modified_base 13: mod_base = OTHER; note = Nucleotide with phosphorothioate linkage
  modified_base 14: mod_base = OTHER; note = Nucleotide with phosphorothioate linkage
  modified_base 15: mod_base = OTHER; note = Nucleotide with phosphorothioate linkage
  modified_base 16: mod_base = OTHER; note = 2'-O-methoxyethyl modified nucleotide with phosphorothioate linkage
  modified_base 17: mod_base = OTHER; note = 2'-O-methoxyethyl modified thymine with phosphorothioate linkage
  modified_base 18: mod_base = OTHER; note = Locked nucleic acid with phosphorothioate linkage
  modified_base 19: mod_base = OTHER; note = 2'-O-methoxyethyl 5-methylcytosine with phosphorothioate linkage
  modified_base 20: mod_base = OTHER; note = 2'-O-methoxyethyl modified nucleotide
  misc_feature 1..6: note = RNA
  misc_feature 7..15: note = DNA
  misc_feature 16..20: note = RNA
cagaggtgaagcgaagtgca

SEQ ID NO: 692 - DNA, 20 bp, synthetic construct
  source 1..20: mol_type = other DNA
  modified_base 1: mod_base = OTHER; note = 2'-O-methoxyethyl 5-methylcytosine with phosphorothioate linkage
  modified_base 2: mod_base = OTHER; note = 2'-O-methoxyethyl modified nucleotide with phosphorothioate linkage
  modified_base 3: mod_base = OTHER; note = Locked nucleic acid with phosphorothioate linkage
  modified_base 4: mod_base = OTHER; note = 2'-O-methoxyethyl modified nucleotide with phosphorothioate linkage
  modified_base 5: mod_base = OTHER; note = 2'-O-methoxyethyl modified nucleotide with phosphorothioate linkage
  modified_base 6: mod_base = OTHER; note = Nucleotide with phosphorothioate linkage
  modified_base 7: mod_base = OTHER; note = Thymine with phosphorothioate linkage
  modified_base 8: mod_base = OTHER; note = Nucleotide with phosphorothioate linkage
  modified_base 9: mod_base = OTHER; note = Nucleotide with phosphorothioate linkage
  modified_base 10: mod_base = OTHER; note = Nucleotide with phosphorothioate linkage
  modified_base 11: mod_base = OTHER; note = Nucleotide with phosphorothioate linkage
  modified_base 12: mod_base = OTHER; note = 5-methylcytosine with phosphorothioate linkage
  modified_base 13: mod_base = OTHER; note = Nucleotide with phosphorothioate linkage
  modified_base 14: mod_base = OTHER; note = Nucleotide with phosphorothioate linkage
  modified_base 15: mod_base = OTHER; note = 2'-O-methoxyethyl modified nucleotide with phosphorothioate linkage
  modified_base 16: mod_base = OTHER; note = 2'-O-methoxyethyl modified nucleotide with phosphorothioate linkage
  modified_base 17: mod_base = OTHER; note = 2'-O-methoxyethyl modified thymine with phosphorothioate linkage
  modified_base 18: mod_base = OTHER; note = Locked nucleic acid with phosphorothioate linkage
  modified_base 19: mod_base = OTHER; note = 2'-O-methoxyethyl 5-methylcytosine with phosphorothioate linkage
  modified_base 20: mod_base = OTHER; note = 2'-O-methoxyethyl modified nucleotide
  misc_feature 1..5: note = RNA
  misc_feature 6..14: note = DNA
  misc_feature 15..20: note = RNA
cagaggtgaagcgaagtgca

SEQ ID NO: 693 - DNA, 20 bp, synthetic construct
  source 1..20: mol_type = other DNA
  modified_base 1: mod_base = OTHER; note = 2'-O-methoxyethyl modified nucleotide with phosphorothioate linkage
  modified_base 2: mod_base = OTHER; note = 2'-O-methoxyethyl 5-methylcytosine with phosphorothioate linkage
  modified_base 3: mod_base = OTHER; note = 2'-O-methoxyethyl modified nucleotide with phosphorothioate linkage
  modified_base 4: mod_base = OTHER; note = 2'-O-methoxyethyl modified nucleotide with phosphorothioate linkage
  modified_base 5: mod_base = OTHER; note = 2'-O-methoxyethyl modified nucleotide with phosphorothioate linkage
  modified_base 6: mod_base = OTHER; note = 2'-O-methyl modified abasic nucleotide with phosphorothioate linkage
  modified_base 7: mod_base = OTHER; note = Nucleotide with phosphorothioate linkage
  modified_base 8: mod_base = OTHER; note = Thymine with phosphorothioate linkage
  modified_base 9: mod_base = OTHER; note = Nucleotide with phosphorothioate linkage
  modified_base 10: mod_base = OTHER; note = Nucleotide with phosphorothioate linkage
  modified_base 11: mod_base = OTHER; note = Nucleotide with phosphorothioate linkage
  modified_base 12: mod_base = OTHER; note = Nucleotide with phosphorothioate linkage
  modified_base 13: mod_base = OTHER; note = 5-methylcytosine with phosphorothioate linkage
  modified_base 14: mod_base = OTHER; note = Nucleotide with phosphorothioate linkage
  modified_base 15: mod_base = OTHER; note = Nucleotide with phosphorothioate linkage
  modified_base 16: mod_base = OTHER; note = 2'-O-methoxyethyl modified nucleotide with phosphorothioate linkage
  modified_base 17: mod_base = OTHER; note = 2'-O-methoxyethyl modified nucleotide with phosphorothioate linkage
  modified_base 18: mod_base = OTHER; note = 2'-O-methoxyethyl modified thymine with phosphorothioate linkage
  modified_base 19: mod_base = OTHER; note = 2'-O-methoxyethyl modified nucleotide with phosphorothioate linkage
  modified_base 20: mod_base = OTHER; note = 2'-O-methoxyethyl 5-methylcytosine
  misc_feature 1..6: note = RNA
  misc_feature 7..15: note = DNA
  misc_feature 16..20: note = RNA
gcagangtgaagcgaagtgc

SEQ ID NO: 694 - DNA, 20 bp, synthetic construct
  source 1..20: mol_type = other DNA
  modified_base 1: mod_base = OTHER; note = 2'-O-methoxyethyl modified nucleotide with phosphorothioate linkage
  modified_base 2: mod_base = OTHER; note = 2'-O-methoxyethyl 5-methylcytosine with phosphorothioate linkage
  modified_base 3: mod_base = OTHER; note = 2'-O-methoxyethyl modified nucleotide with phosphorothioate linkage
  modified_base 4: mod_base = OTHER; note = 2'-O-methoxyethyl modified nucleotide with phosphorothioate linkage
  modified_base 5: mod_base = OTHER; note = 2'-O-methoxyethyl modified nucleotide with phosphorothioate linkage
  modified_base 6: mod_base = OTHER; note = Nucleotide with phosphorothioate linkage
  modified_base 7: mod_base = OTHER; note = 2'-O-methyl modified abasic nucleotide with phosphorothioate linkage
  modified_base 8: mod_base = OTHER; note = Thymine with phosphorothioate linkage
  modified_base 9: mod_base = OTHER; note = Nucleotide with phosphorothioate linkage
  modified_base 10: mod_base = OTHER; note = Nucleotide with phosphorothioate linkage
  modified_base 11: mod_base = OTHER; note = Nucleotide with phosphorothioate linkage
  modified_base 12: mod_base = OTHER; note = Nucleotide with phosphorothioate linkage
  modified_base 13: mod_base = OTHER; note = 5-methylcytosine with phosphorothioate linkage
  modified_base 14: mod_base = OTHER; note = Nucleotide with phosphorothioate linkage
  modified_base 15: mod_base = OTHER; note = Nucleotide with phosphorothioate linkage
  modified_base 16: mod_base = OTHER; note = 2'-O-methoxyethyl modified nucleotide with phosphorothioate linkage
  modified_base 17: mod_base = OTHER; note = 2'-O-methoxyethyl modified nucleotide with phosphorothioate linkage
  modified_base 18: mod_base = OTHER; note = 2'-O-methoxyethyl modified thymine with phosphorothioate linkage
  modified_base 19: mod_base = OTHER; note = 2'-O-methoxyethyl modified nucleotide with phosphorothioate linkage
  modified_base 20: mod_base = OTHER; note = 2'-O-methoxyethyl 5-methylcytosine
  misc_feature 1..5: note = RNA
  misc_feature 6: note = DNA
  misc_feature 7: note = RNA
  misc_feature 8..15: note = DNA
  misc_feature 16..20: note = RNA
gcagagntgaagcgaagtgc

SEQ ID NO: 695 - DNA, 20 bp, synthetic construct
  source 1..20: mol_type = other DNA
  modified_base 1: mod_base = OTHER; note = 2'-O-methoxyethyl modified nucleotide with phosphorothioate linkage
  modified_base 2: mod_base = OTHER; note = 2'-O-methoxyethyl 5-methylcytosine with phosphorothioate linkage
  modified_base 3: mod_base = OTHER; note = 2'-O-methoxyethyl modified nucleotide with phosphorothioate linkage
  modified_base 4: mod_base = OTHER; note = 2'-O-methoxyethyl modified nucleotide with phosphorothioate linkage
  modified_base 5: mod_base = OTHER; note = 2'-O-methoxyethyl modified nucleotide with phosphorothioate linkage
  modified_base 6: mod_base = OTHER; note = Nucleotide with phosphorothioate linkage
  modified_base 7: mod_base = OTHER; note = Nucleotide with phosphorothioate linkage
  modified_base 8: mod_base = OTHER; note = 2'-O-methyl modified abasic nucleotide with phosphorothioate linkage
  modified_base 9: mod_base = OTHER; note = Nucleotide with phosphorothioate linkage
  modified_base 10: mod_base = OTHER; note = Nucleotide with phosphorothioate linkage
  modified_base 11: mod_base = OTHER; note = Nucleotide with phosphorothioate linkage
  modified_base 12: mod_base = OTHER; note = Nucleotide with phosphorothioate linkage
  modified_base 13: mod_base = OTHER; note = 5-methylcytosine with phosphorothioate linkage
  modified_base 14: mod_base = OTHER; note = Nucleotide with phosphorothioate linkage
  modified_base 15: mod_base = OTHER; note = Nucleotide with phosphorothioate linkage
  modified_base 16: mod_base = OTHER; note = 2'-O-methoxyethyl modified nucleotide with phosphorothioate linkage
  modified_base 17: mod_base = OTHER; note = 2'-O-methoxyethyl modified nucleotide with phosphorothioate linkage
  modified_base 18: mod_base = OTHER; note = 2'-O-methoxyethyl modified thymine with phosphorothioate linkage
  modified_base 19: mod_base = OTHER; note = 2'-O-methoxyethyl modified nucleotide with phosphorothioate linkage
  modified_base 20: mod_base = OTHER; note = 2'-O-methoxyethyl 5-methylcytosine
  misc_feature 1..5: note = RNA
  misc_feature 6..7: note = DNA
  misc_feature 8: note = RNA
  misc_feature 9..15: note = DNA
  misc_feature 16..20: note = RNA
gcagaggngaagcgaagtgc

SEQ ID NO: 696 - DNA, 20 bp, synthetic construct
  source 1..20: mol_type = other DNA
  modified_base 1: mod_base = OTHER; note = 2'-O-methoxyethyl modified nucleotide with phosphorothioate linkage
  modified_base 2: mod_base = OTHER; note = 2'-O-methoxyethyl 5-methylcytosine with phosphorothioate linkage
  modified_base 3: mod_base = OTHER; note = 2'-O-methoxyethyl modified nucleotide with phosphorothioate linkage
  modified_base 4: mod_base = OTHER; note = 2'-O-methoxyethyl modified nucleotide with phosphorothioate linkage
  modified_base 5: mod_base = OTHER; note = 2'-O-methoxyethyl modified nucleotide with phosphorothioate linkage
  modified_base 6: mod_base = OTHER; note = Nucleotide with phosphorothioate linkage
  modified_base 7: mod_base = OTHER; note = Nucleotide with phosphorothioate linkage
  modified_base 8: mod_base = OTHER; note = Thymine with phosphorothioate linkage
  modified_base 9: mod_base = OTHER; note = 2'-O-methyl modified abasic nucleotide with phosphorothioate linkage
  modified_base 10: mod_base = OTHER; note = Nucleotide with phosphorothioate linkage
  modified_base 11: mod_base = OTHER; note = Nucleotide with phosphorothioate linkage
  modified_base 12: mod_base = OTHER; note = Nucleotide with phosphorothioate linkage
  modified_base 13: mod_base = OTHER; note = 5-methylcytosine with phosphorothioate linkage
  modified_base 14: mod_base = OTHER; note = Nucleotide with phosphorothioate linkage
  modified_base 15: mod_base = OTHER; note = Nucleotide with phosphorothioate linkage
  modified_base 16: mod_base = OTHER; note = 2'-O-methoxyethyl modified nucleotide with phosphorothioate linkage
  modified_base 17: mod_base = OTHER; note = 2'-O-methoxyethyl modified nucleotide with phosphorothioate linkage
  modified_base 18: mod_base = OTHER; note = 2'-O-methoxyethyl modified thymine with phosphorothioate linkage
  modified_base 19: mod_base = OTHER; note = 2'-O-methoxyethyl modified nucleotide with phosphorothioate linkage
  modified_base 20: mod_base = OTHER; note = 2'-O-methoxyethyl 5-methylcytosine
  misc_feature 1..5: note = RNA
  misc_feature 6..8: note = DNA
  misc_feature 9: note = RNA
  misc_feature 10..15: note = DNA
  misc_feature 16..20: note = RNA
gcagaggtnaagcgaagtgc

SEQ ID NO: 697 - DNA, 20 bp, synthetic construct
  source 1..20: mol_type = other DNA
  modified_base 1: mod_base = OTHER; note = 2'-O-methoxyethyl modified nucleotide with phosphorothioate linkage
  modified_base 2: mod_base = OTHER; note = 2'-O-methoxyethyl 5-methylcytosine with phosphorothioate linkage
  modified_base 3: mod_base = OTHER; note = 2'-O-methoxyethyl modified nucleotide with phosphorothioate linkage
  modified_base 4: mod_base = OTHER; note = 2'-O-methoxyethyl modified nucleotide with phosphorothioate linkage
  modified_base 5: mod_base = OTHER; note = 2'-O-methoxyethyl modified nucleotide with phosphorothioate linkage
  modified_base 6: mod_base = OTHER; note = Nucleotide with phosphorothioate linkage
  modified_base 7: mod_base = OTHER; note = Nucleotide with phosphorothioate linkage
  modified_base 8: mod_base = OTHER; note = Thymine with phosphorothioate linkage
  modified_base 9: mod_base = OTHER; note = Nucleotide with phosphorothioate linkage
  modified_base 10: mod_base = OTHER; note = 2'-O-methyl modified abasic nucleotide with phosphorothioate linkage
  modified_base 11: mod_base = OTHER; note = Nucleotide with phosphorothioate linkage
  modified_base 12: mod_base = OTHER; note = Nucleotide with phosphorothioate linkage
  modified_base 13: mod_base = OTHER; note = 5-methylcytosine with phosphorothioate linkage
  modified_base 14: mod_base = OTHER; note = Nucleotide with phosphorothioate linkage
  modified_base 15: mod_base = OTHER; note = Nucleotide with phosphorothioate linkage
  modified_base 16: mod_base = OTHER; note = 2'-O-methoxyethyl modified nucleotide with phosphorothioate linkage
  modified_base 17: mod_base = OTHER; note = 2'-O-methoxyethyl modified nucleotide with phosphorothioate linkage
  modified_base 18: mod_base = OTHER; note = 2'-O-methoxyethyl modified thymine with phosphorothioate linkage
  modified_base 19: mod_base = OTHER; note = 2'-O-methoxyethyl modified nucleotide with phosphorothioate linkage
  modified_base 20: mod_base = OTHER; note = 2'-O-methoxyethyl 5-methylcytosine
  misc_feature 1..5: note = RNA
  misc_feature 6..9: note = DNA
  misc_feature 10: note = RNA
  misc_feature 11..15: note = DNA
  misc_feature 16..20: note = RNA
gcagaggtgnagcgaagtgc

SEQ ID NO: 698 - DNA, 20 bp, synthetic construct
  source 1..20: mol_type = other DNA
  modified_base 1: mod_base = OTHER; note = 2'-O-methoxyethyl modified nucleotide with phosphorothioate linkage
  modified_base 2: mod_base = OTHER; note = 2'-O-methoxyethyl 5-methylcytosine with phosphorothioate linkage
  modified_base 3: mod_base = OTHER; note = 2'-O-methoxyethyl modified nucleotide with phosphorothioate linkage
  modified_base 4: mod_base = OTHER; note = 2'-O-methoxyethyl modified nucleotide with phosphorothioate linkage
  modified_base 5: mod_base = OTHER; note = 2'-O-methoxyethyl modified nucleotide with phosphorothioate linkage
  modified_base 6: mod_base = OTHER; note = Nucleotide with phosphorothioate linkage
  modified_base 7: mod_base = OTHER; note = Nucleotide with phosphorothioate linkage
  modified_base 8: mod_base = OTHER; note = Thymine with phosphorothioate linkage
  modified_base 9: mod_base = OTHER; note = Nucleotide with phosphorothioate linkage
  modified_base 10: mod_base = OTHER; note = Nucleotide with phosphorothioate linkage
  modified_base 11: mod_base = OTHER; note = 2'-O-methyl modified abasic nucleotide with phosphorothioate linkage
  modified_base 12: mod_base = OTHER; note = Nucleotide with phosphorothioate linkage
  modified_base 13: mod_base = OTHER; note = 5-methylcytosine with phosphorothioate linkage
  modified_base 14: mod_base = OTHER; note = Nucleotide with phosphorothioate linkage
  modified_base 15: mod_base = OTHER; note = Nucleotide with phosphorothioate linkage
  modified_base 16: mod_base = OTHER; note = 2'-O-methoxyethyl modified nucleotide with phosphorothioate linkage
  modified_base 17: mod_base = OTHER; note = 2'-O-methoxyethyl modified nucleotide with phosphorothioate linkage
  modified_base 18: mod_base = OTHER; note = 2'-O-methoxyethyl modified thymine with phosphorothioate linkage
  modified_base 19: mod_base = OTHER; note = 2'-O-methoxyethyl modified nucleotide with phosphorothioate linkage
  modified_base 20: mod_base = OTHER; note = 2'-O-methoxyethyl 5-methylcytosine
  misc_feature 1..5: note = RNA
  misc_feature 6..10: note = DNA
  misc_feature 11: note = RNA
  misc_feature 12..15: note = DNA
  misc_feature 16..20: note = RNA
gcagaggtgangcgaagtgc

SEQ ID NO: 699 - DNA, 20 bp, synthetic construct
  source 1..20: mol_type = other DNA
  modified_base 1: mod_base = OTHER; note = 2'-O-methoxyethyl modified nucleotide with phosphorothioate linkage
  modified_base 2: mod_base = OTHER; note = 2'-O-methoxyethyl 5-methylcytosine with phosphorothioate linkage
  modified_base 3: mod_base = OTHER; note = 2'-O-methoxyethyl modified nucleotide with phosphorothioate linkage
  modified_base 4: mod_base = OTHER; note = 2'-O-methoxyethyl modified nucleotide with phosphorothioate linkage
  modified_base 5: mod_base = OTHER; note = 2'-O-methoxyethyl modified nucleotide with phosphorothioate linkage
  modified_base 6: mod_base = OTHER; note = Nucleotide with phosphorothioate linkage
  modified_base 7: mod_base = OTHER; note = Nucleotide with phosphorothioate linkage
  modified_base 8: mod_base = OTHER; note = Thymine with phosphorothioate linkage
  modified_base 9: mod_base = OTHER; note = Nucleotide with phosphorothioate linkage
  modified_base 10: mod_base = OTHER; note = Nucleotide with phosphorothioate linkage
  modified_base 11: mod_base = OTHER; note = Nucleotide with phosphorothioate linkage
  modified_base 12: mod_base = OTHER; note = 2'-O-methyl modified abasic nucleotide with phosphorothioate linkage
  modified_base 13: mod_base = OTHER; note = 5-methylcytosine with phosphorothioate linkage
  modified_base 14: mod_base = OTHER; note = Nucleotide with phosphorothioate linkage
  modified_base 15: mod_base = OTHER; note = Nucleotide with phosphorothioate linkage
  modified_base 16: mod_base = OTHER; note = 2'-O-methoxyethyl modified nucleotide with phosphorothioate linkage
  modified_base 17: mod_base = OTHER; note = 2'-O-methoxyethyl modified nucleotide with phosphorothioate linkage
  modified_base 18: mod_base = OTHER; note = 2'-O-methoxyethyl modified thymine with phosphorothioate linkage
  modified_base 19: mod_base = OTHER; note = 2'-O-methoxyethyl modified nucleotide with phosphorothioate linkage
  modified_base 20: mod_base = OTHER; note = 2'-O-methoxyethyl 5-methylcytosine
  misc_feature 1..5: note = RNA
  misc_feature 6..11: note = DNA
  misc_feature 12: note = RNA
  misc_feature 13..15: note = DNA
  misc_feature 16..20: note = RNA
gcagaggtgaancgaagtgc

SEQ ID NO: 700 - DNA, 20 bp, synthetic construct
  source 1..20: mol_type = other DNA
  modified_base 1: mod_base = OTHER; note = 2'-O-methoxyethyl modified nucleotide with phosphorothioate linkage
  modified_base 2: mod_base = OTHER; note = 2'-O-methoxyethyl 5-methylcytosine with phosphorothioate linkage
  modified_base 3: mod_base = OTHER; note = 2'-O-methoxyethyl modified nucleotide with phosphorothioate linkage
  modified_base 4: mod_base = OTHER; note = 2'-O-methoxyethyl modified nucleotide with phosphorothioate linkage
  modified_base 5: mod_base = OTHER; note = 2'-O-methoxyethyl modified nucleotide with phosphorothioate linkage
  modified_base 6: mod_base = OTHER; note = Nucleotide with phosphorothioate linkage
  modified_base 7: mod_base = OTHER; note = Nucleotide with phosphorothioate linkage
  modified_base 8: mod_base = OTHER; note = Thymine with phosphorothioate linkage
  modified_base 9: mod_base = OTHER; note = Nucleotide with phosphorothioate linkage
  modified_base 10: mod_base = OTHER; note = Nucleotide with phosphorothioate linkage
  modified_base 11: mod_base = OTHER; note = Nucleotide with phosphorothioate linkage
  modified_base 12: mod_base = OTHER; note = Nucleotide with phosphorothioate linkage
  modified_base 13: mod_base = OTHER; note = 2'-O-methyl modified abasic nucleotide with phosphorothioate linkage
  modified_base 14: mod_base = OTHER; note = Nucleotide with phosphorothioate linkage
  modified_base 15: mod_base = OTHER; note = Nucleotide with phosphorothioate linkage
  modified_base 16: mod_base = OTHER; note = 2'-O-methoxyethyl modified nucleotide with phosphorothioate linkage
  modified_base 17: mod_base = OTHER; note = 2'-O-methoxyethyl modified nucleotide with phosphorothioate linkage
  modified_base 18: mod_base = OTHER; note = 2'-O-methoxyethyl modified thymine with phosphorothioate linkage
  modified_base 19: mod_base = OTHER; note = 2'-O-methoxyethyl modified nucleotide with phosphorothioate linkage
  modified_base 20: mod_base = OTHER; note = 2'-O-methoxyethyl 5-methylcytosine
  misc_feature 1..5: note = RNA
  misc_feature 6..12: note = DNA
  misc_feature 13: note = RNA
  misc_feature 14..15: note = DNA
  misc_feature 16..20: note = RNA
gcagaggtgaagngaagtgc

SEQ ID NO: 701 - DNA, 20 bp, synthetic construct
  source 1..20: mol_type = other DNA
  modified_base 1: mod_base = OTHER; note = 2'-O-methoxyethyl modified nucleotide with phosphorothioate linkage
  modified_base 2: mod_base = OTHER; note = 2'-O-methoxyethyl 5-methylcytosine with phosphorothioate linkage
  modified_base 3: mod_base = OTHER; note = 2'-O-methoxyethyl modified nucleotide with phosphorothioate linkage
  modified_base 4: mod_base = OTHER; note = 2'-O-methoxyethyl modified nucleotide with phosphorothioate linkage
  modified_base 5: mod_base = OTHER; note = 2'-O-methoxyethyl modified nucleotide with phosphorothioate linkage
  modified_base 6: mod_base = OTHER; note = Nucleotide with phosphorothioate linkage
  modified_base 7: mod_base = OTHER; note = Nucleotide with phosphorothioate linkage
  modified_base 8: mod_base = OTHER; note = Thymine with phosphorothioate linkage
  modified_base 9: mod_base = OTHER; note = Nucleotide with phosphorothioate linkage
  modified_base 10: mod_base = OTHER; note = Nucleotide with phosphorothioate linkage
  modified_base 11: mod_base = OTHER; note = Nucleotide with phosphorothioate linkage
  modified_base 12: mod_base = OTHER; note = Nucleotide with phosphorothioate linkage
  modified_base 13: mod_base = OTHER; note = 5-methylcytosine with phosphorothioate linkage
  modified_base 14: mod_base = OTHER; note = 2'-O-methyl modified abasic nucleotide with phosphorothioate linkage
  modified_base 15: mod_base = OTHER; note = Nucleotide with phosphorothioate linkage
  modified_base 16: mod_base = OTHER; note = 2'-O-methoxyethyl modified nucleotide with phosphorothioate linkage
  modified_base 17: mod_base = OTHER; note = 2'-O-methoxyethyl modified nucleotide with phosphorothioate linkage
  modified_base 18: mod_base = OTHER; note = 2'-O-methoxyethyl modified thymine with phosphorothioate linkage
  modified_base 19: mod_base = OTHER; note = 2'-O-methoxyethyl modified nucleotide with phosphorothioate linkage
  modified_base 20: mod_base = OTHER; note = 2'-O-methoxyethyl 5-methylcytosine
  misc_feature 1..5: note = RNA
  misc_feature 6..13: note = DNA
  misc_feature 14: note = RNA
  misc_feature 15: note = DNA
  misc_feature 16..20: note = RNA
gcagaggtgaagcnaagtgc

SEQ ID NO: 702 - DNA, 20 bp, synthetic construct
  source 1..20: mol_type = other DNA
  modified_base 1: mod_base = OTHER; note = 2'-O-methoxyethyl modified nucleotide with phosphorothioate linkage
  modified_base 2: mod_base = OTHER; note = 2'-O-methoxyethyl 5-methylcytosine with phosphorothioate linkage
  modified_base 3: mod_base = OTHER; note = 2'-O-methoxyethyl modified nucleotide with phosphorothioate linkage
  modified_base 4: mod_base = OTHER; note = 2'-O-methoxyethyl modified nucleotide with phosphorothioate linkage
  modified_base 5: mod_base = OTHER; note = 2'-O-methoxyethyl modified nucleotide with phosphorothioate linkage
  modified_base 6: mod_base = OTHER; note = Nucleotide with phosphorothioate linkage
  modified_base 7: mod_base = OTHER; note = Nucleotide with phosphorothioate linkage
  modified_base 8: mod_base = OTHER; note = Thymine with phosphorothioate linkage
  modified_base 9: mod_base = OTHER; note = Nucleotide with phosphorothioate linkage
  modified_base 10: mod_base = OTHER; note = Nucleotide with phosphorothioate linkage
  modified_base 11: mod_base = OTHER; note = Nucleotide with phosphorothioate linkage
  modified_base 12: mod_base = OTHER; note = Nucleotide with phosphorothioate linkage
  modified_base 13: mod_base = OTHER; note = 5-methylcytosine with phosphorothioate linkage
  modified_base 14: mod_base = OTHER; note = Nucleotide with phosphorothioate linkage
  modified_base 15: mod_base = OTHER; note = 2'-O-methyl modified abasic nucleotide with phosphorothioate linkage
  modified_base 16: mod_base = OTHER; note = 2'-O-methoxyethyl modified nucleotide with phosphorothioate linkage
  modified_base 17: mod_base = OTHER; note = 2'-O-methoxyethyl modified nucleotide with phosphorothioate linkage
  modified_base 18: mod_base = OTHER; note = 2'-O-methoxyethyl modified thymine with phosphorothioate linkage
  modified_base 19: mod_base = OTHER; note = 2'-O-methoxyethyl modified nucleotide with phosphorothioate linkage
  modified_base 20: mod_base = OTHER; note = 2'-O-methoxyethyl 5-methylcytosine
  misc_feature 1..5: note = RNA
  misc_feature 6..14: note = DNA
  misc_feature 15..20: note = RNA
gcagaggtgaagcgnagtgc

SEQ ID NO: 703 - DNA, 20 bp, synthetic construct
  source 1..20: mol_type = other DNA
  modified_base 1: mod_base = OTHER; note = 2'-O-methoxyethyl modified nucleotide with phosphorothioate linkage
  modified_base 2: mod_base = OTHER; note = 2'-O-methoxyethyl 5-methylcytosine with phosphorothioate linkage
  modified_base 3: mod_base = OTHER; note = 2'-O-methoxyethyl modified nucleotide with phosphorothioate linkage
  modified_base 4: mod_base = OTHER; note = 2'-O-methoxyethyl modified nucleotide with phosphorothioate linkage
  modified_base 5: mod_base = OTHER; note = 2'-O-methoxyethyl modified nucleotide with phosphorothioate linkage
  modified_base 6: mod_base = OTHER; note = Nucleotide with phosphorothioate linkage
  modified_base 7: mod_base = OTHER; note = Nucleotide with phosphorothioate linkage
  modified_base 8: mod_base = OTHER; note = Thymine with phosphorothioate linkage
  modified_base 9: mod_base = OTHER; note = Nucleotide with phosphorothioate linkage
  modified_base 10: mod_base = OTHER; note = Nucleotide with phosphorothioate linkage
  modified_base 11: mod_base = OTHER; note = Nucleotide with phosphorothioate linkage
  modified_base 12: mod_base = OTHER; note = Nucleotide with phosphorothioate linkage
  modified_base 13: mod_base = OTHER; note = 5-methylcytosine with phosphorothioate linkage
  modified_base 14: mod_base = OTHER; note = Nucleotide with phosphorothioate linkage
  modified_base 15: mod_base = OTHER; note = Nucleotide with phosphorothioate linkage
  modified_base 16: mod_base = OTHER; note = 2'-O-methoxyethyl modified nucleotide with phosphorothioate linkage
  modified_base 17: mod_base = OTHER; note = 2'-O-methoxyethyl modified nucleotide with phosphorothioate linkage
  modified_base 18: mod_base = OTHER; note = 2'-O-methoxyethyl modified thymine with phosphorothioate linkage
  modified_base 19: mod_base = OTHER; note = 2'-O-methoxyethyl modified nucleotide with phosphorothioate linkage
  modified_base 20: mod_base = OTHER; note = 2'-O-methoxyethyl 5-methylcytosine
  misc_feature 1..5: note = RNA
  misc_feature 6..15: note = DNA
  misc_feature 16..20: note = RNA
gcagaggtaaagcgaagtgc

SEQ ID NO: 704 - DNA, 20 bp, synthetic construct
  source 1..20: mol_type = other DNA
  modified_base 1: mod_base = OTHER; note = 2'-O-methoxyethyl modified nucleotide with phosphorothioate linkage
  modified_base 2: mod_base = OTHER; note = 2'-O-methoxyethyl 5-methylcytosine with phosphorothioate linkage
  modified_base 3: mod_base = OTHER; note = 2'-O-methoxyethyl modified nucleotide with phosphorothioate linkage
  modified_base 4: mod_base = OTHER; note = 2'-O-methoxyethyl modified nucleotide with phosphorothioate linkage
  modified_base 5: mod_base = OTHER; note = 2'-O-methoxyethyl modified nucleotide with phosphorothioate linkage
  modified_base 6: mod_base = OTHER; note = Nucleotide with phosphorothioate linkage
  modified_base 7: mod_base = OTHER; note = Nucleotide with phosphorothioate linkage
  modified_base 8: mod_base = OTHER; note = Thymine with phosphorothioate linkage
  modified_base 9: mod_base = OTHER; note = 5-methylcytosine with phosphorothioate linkage
  modified_base 10: mod_base = OTHER; note = Nucleotide with phosphorothioate linkage
  modified_base 11: mod_base = OTHER; note = Nucleotide with phosphorothioate linkage
  modified_base 12: mod_base = OTHER; note = Nucleotide with phosphorothioate linkage
  modified_base 13: mod_base = OTHER; note = 5-methylcytosine with phosphorothioate linkage
  modified_base 14: mod_base = OTHER; note = Nucleotide with phosphorothioate linkage
  modified_base 15: mod_base = OTHER; note = Nucleotide with phosphorothioate linkage
  modified_base 16: mod_base = OTHER; note = 2'-O-methoxyethyl modified nucleotide with phosphorothioate linkage
  modified_base 17: mod_base = OTHER; note = 2'-O-methoxyethyl modified nucleotide with phosphorothioate linkage
  modified_base 18: mod_base = OTHER; note = 2'-O-methoxyethyl modified thymine with phosphorothioate linkage
  modified_base 19: mod_base = OTHER; note = 2'-O-methoxyethyl modified nucleotide with phosphorothioate linkage
  modified_base 20: mod_base = OTHER; note = 2'-O-methoxyethyl 5-methylcytosine
  misc_feature 1..5: note = RNA
  misc_feature 6..15: note = DNA
  misc_feature 16..20: note = RNA
gcagaggtcaagcgaagtgc

SEQ ID NO: 705 - DNA, 20 bp, synthetic construct
  source 1..20: mol_type = other DNA
  modified_base 1: mod_base = OTHER; note = 2'-O-methoxyethyl modified nucleotide with phosphorothioate linkage
  modified_base 2: mod_base = OTHER; note = 2'-O-methoxyethyl 5-methylcytosine with phosphorothioate linkage
  modified_base 3: mod_base = OTHER; note = 2'-O-methoxyethyl modified nucleotide with phosphorothioate linkage
  modified_base 4: mod_base = OTHER; note = 2'-O-methoxyethyl modified nucleotide with phosphorothioate linkage
  modified_base 5: mod_base = OTHER; note = 2'-O-methoxyethyl modified nucleotide with phosphorothioate linkage
  modified_base 6: mod_base = OTHER; note = Nucleotide with phosphorothioate linkage
  modified_base 7: mod_base = OTHER; note = Nucleotide with phosphorothioate linkage
  modified_base 8: mod_base = OTHER; note = Thymine with phosphorothioate linkage
  modified_base 9: mod_base = OTHER; note = Thymine with phosphorothioate linkage
  modified_base 10: mod_base = OTHER; note = Nucleotide with phosphorothioate linkage
  modified_base 11: mod_base = OTHER; note = Nucleotide with phosphorothioate linkage
  modified_base 12: mod_base = OTHER; note = Nucleotide with phosphorothioate linkage
  modified_base 13: mod_base = OTHER; note = 5-methylcytosine with phosphorothioate linkage
  modified_base 14: mod_base = OTHER; note = Nucleotide with phosphorothioate linkage
  modified_base 15: mod_base = OTHER; note = Nucleotide with phosphorothioate linkage
  modified_base 16: mod_base = OTHER; note = 2'-O-methoxyethyl modified nucleotide with phosphorothioate linkage
  modified_base 17: mod_base = OTHER; note = 2'-O-methoxyethyl modified nucleotide with phosphorothioate linkage
  modified_base 18: mod_base = OTHER; note = 2'-O-methoxyethyl modified thymine with phosphorothioate linkage
  modified_base 19: mod_base = OTHER; note = 2'-O-methoxyethyl modified nucleotide with phosphorothioate linkage
  modified_base 20: mod_base = OTHER; note = 2'-O-methoxyethyl 5-methylcytosine
  misc_feature 1..5: note = RNA
  misc_feature 6..15: note = DNA
  misc_feature 16..20: note = RNA
gcagaggttaagcgaagtgc

SEQ ID NO: 706 - DNA, 20 bp, synthetic construct
  source 1..20: mol_type = other DNA
  modified_base 1: mod_base = OTHER; note = 2'-O-methoxyethyl modified nucleotide with phosphorothioate linkage
  modified_base 2: mod_base = OTHER; note = 2'-O-methoxyethyl 5-methylcytosine with phosphorothioate linkage
  modified_base 3: mod_base = OTHER; note = 2'-O-methoxyethyl modified nucleotide with phosphorothioate linkage
  modified_base 4: mod_base = OTHER; note = 2'-O-methoxyethyl modified nucleotide with phosphorothioate linkage
  modified_base 5: mod_base = OTHER; note = 2'-O-methoxyethyl modified nucleotide with phosphorothioate linkage
  modified_base 6: mod_base = OTHER; note = Nucleotide with phosphorothioate linkage
  modified_base 7: mod_base = OTHER; note = Nucleotide with phosphorothioate linkage
  modified_base 8: mod_base = OTHER; note = Thymine with phosphorothioate linkage
  modified_base 9: mod_base = OTHER; note = Nucleotide with phosphorothioate linkage
  modified_base 10: mod_base = OTHER; note = 5-methylcytosine with phosphorothioate linkage
  modified_base 11: mod_base = OTHER; note = Nucleotide with phosphorothioate linkage
  modified_base 12: mod_base = OTHER; note = Nucleotide with phosphorothioate linkage
  modified_base 13: mod_base = OTHER; note = 5-methylcytosine with phosphorothioate linkage
  modified_base 14: mod_base = OTHER; note = Nucleotide with phosphorothioate linkage
  modified_base 15: mod_base = OTHER; note = Nucleotide with phosphorothioate linkage
  modified_base 16: mod_base = OTHER; note = 2'-O-methoxyethyl modified nucleotide with phosphorothioate linkage
  modified_base 17: mod_base = OTHER; note = 2'-O-methoxyethyl modified nucleotide with phosphorothioate linkage
  modified_base 18: mod_base = OTHER; note = 2'-O-methoxyethyl modified thymine with phosphorothioate linkage
  modified_base 19: mod_base = OTHER; note = 2'-O-methoxyethyl modified nucleotide with phosphorothioate linkage
  modified_base 20: mod_base = OTHER; note = 2'-O-methoxyethyl 5-methylcytosine
  misc_feature 1..5: note = RNA
  misc_feature 6..15: note = DNA
  misc_feature 16..20: note = RNA
gcagaggtgcagcgaagtgc

SEQ ID NO: 707 - DNA, 20 bp, synthetic construct
  source 1..20: mol_type = other DNA
  modified_base 1: mod_base = OTHER; note = 2'-O-methoxyethyl modified nucleotide with phosphorothioate linkage
  modified_base 2: mod_base = OTHER; note = 2'-O-methoxyethyl 5-methylcytosine with phosphorothioate linkage
  modified_base 3: mod_base = OTHER; note = 2'-O-methoxyethyl modified nucleotide with phosphorothioate linkage
  modified_base 4: mod_base = OTHER; note = 2'-O-methoxyethyl modified nucleotide with phosphorothioate linkage
  modified_base 5: mod_base = OTHER; note = 2'-O-methoxyethyl modified nucleotide with phosphorothioate linkage
  modified_base 6: mod_base = OTHER; note = Nucleotide with phosphorothioate linkage
  modified_base 7: mod_base = OTHER; note = Nucleotide with phosphorothioate linkage
  modified_base 8: mod_base = OTHER; note = Thymine with phosphorothioate linkage
  modified_base 9: mod_base = OTHER; note = Nucleotide with phosphorothioate linkage
  modified_base 10: mod_base = OTHER; note = Nucleotide with phosphorothioate linkage
  modified_base 11: mod_base = OTHER; note = Nucleotide with phosphorothioate linkage
  modified_base 12: mod_base = OTHER; note = Nucleotide with phosphorothioate linkage
  modified_base 13: mod_base = OTHER; note = 5-methylcytosine with phosphorothioate linkage
  modified_base 14: mod_base = OTHER; note = Nucleotide with phosphorothioate linkage
  modified_base 15: mod_base = OTHER; note = Nucleotide with phosphorothioate linkage
  modified_base 16: mod_base = OTHER; note = 2'-O-methoxyethyl modified nucleotide with phosphorothioate linkage
  modified_base 17: mod_base = OTHER; note = 2'-O-methoxyethyl modified nucleotide with phosphorothioate linkage
  modified_base 18: mod_base = OTHER; note = 2'-O-methoxyethyl modified thymine with phosphorothioate linkage
  modified_base 19: mod_base = OTHER; note = 2'-O-methoxyethyl modified nucleotide with phosphorothioate linkage
  modified_base 20: mod_base = OTHER; note = 2'-O-methoxyethyl 5-methylcytosine
  misc_feature 1..5: note = RNA
  misc_feature 6..15: note = DNA
  misc_feature 16..20: note = RNA
gcagaggtggagcgaagtgc

SEQ ID NO: 708 - DNA, 20 bp, synthetic construct
  source 1..20: mol_type = other DNA
  modified_base 1: mod_base = OTHER; note = 2'-O-methoxyethyl modified nucleotide with phosphorothioate linkage
  modified_base 2: mod_base = OTHER; note = 2'-O-methoxyethyl 5-methylcytosine with phosphorothioate linkage
  modified_base 3: mod_base = OTHER; note = 2'-O-methoxyethyl modified nucleotide with phosphorothioate linkage
  modified_base 4: mod_base = OTHER; note = 2'-O-methoxyethyl modified nucleotide with phosphorothioate linkage
  modified_base 5: mod_base = OTHER; note = 2'-O-methoxyethyl modified nucleotide with phosphorothioate linkage
  modified_base 6: mod_base = OTHER; note = Nucleotide with phosphorothioate linkage
  modified_base 7: mod_base = OTHER; note = Nucleotide with phosphorothioate linkage
  modified_base 8: mod_base = OTHER; note = Thymine with phosphorothioate linkage
  modified_base 9: mod_base = OTHER; note = Nucleotide with phosphorothioate linkage
  modified_base 10: mod_base = OTHER; note = Thymine with phosphorothioate linkage
  modified_base 11: mod_base = OTHER; note = Nucleotide with phosphorothioate linkage
  modified_base 12: mod_base = OTHER; note = Nucleotide with phosphorothioate linkage
  modified_base 13: mod_base = OTHER; note = 5-methylcytosine with phosphorothioate linkage
  modified_base 14: mod_base = OTHER; note = Nucleotide with phosphorothioate linkage
  modified_base 15: mod_base = OTHER; note = Nucleotide with phosphorothioate linkage
  modified_base 16: mod_base = OTHER; note = 2'-O-methoxyethyl modified nucleotide with phosphorothioate linkage
  modified_base 17: mod_base = OTHER; note = 2'-O-methoxyethyl modified nucleotide with phosphorothioate linkage
  modified_base 18: mod_base = OTHER; note = 2'-O-methoxyethyl modified thymine with phosphorothioate linkage
  modified_base 19: mod_base = OTHER; note = 2'-O-methoxyethyl modified nucleotide with phosphorothioate linkage
  modified_base 20: mod_base = OTHER; note = 2'-O-methoxyethyl 5-methylcytosine
  misc_feature 1..5: note = RNA
  misc_feature 6..15: note = DNA
  misc_feature 16..20: note = RNA
gcagaggtgtagcgaagtgc

SEQ ID NO: 709 - DNA, 20 bp, synthetic construct
  source 1..20: mol_type = other DNA
  modified_base 1: mod_base = OTHER; note = 2'-O-methoxyethyl modified nucleotide with phosphorothioate linkage
  modified_base 2: mod_base = OTHER; note = 2'-O-methoxyethyl 5-methylcytosine with phosphorothioate linkage
  modified_base 3: mod_base = OTHER; note = 2'-O-methoxyethyl modified nucleotide with phosphorothioate linkage
  modified_base 4: mod_base = OTHER; note = 2'-O-methoxyethyl modified nucleotide with phosphorothioate linkage
  modified_base 5: mod_base = OTHER; note = 2'-O-methoxyethyl modified nucleotide with phosphorothioate linkage
  modified_base 6: mod_base = OTHER; note = Nucleotide with phosphorothioate linkage
  modified_base 7: mod_base = OTHER; note = Nucleotide with phosphorothioate linkage
  modified_base 8: mod_base = OTHER; note = Thymine with phosphorothioate linkage
  modified_base 9: mod_base = OTHER; note = Nucleotide with phosphorothioate linkage
  modified_base 10: mod_base = OTHER; note = Nucleotide with phosphorothioate linkage
  modified_base 11: mod_base = OTHER; note = 5-methylcytosine with phosphorothioate linkage
  modified_base 12: mod_base = OTHER; note = Nucleotide with phosphorothioate linkage
  modified_base 13: mod_base = OTHER; note = 5-methylcytosine with phosphorothioate linkage
  modified_base 14: mod_base = OTHER; note = Nucleotide with phosphorothioate linkage
  modified_base 15: mod_base = OTHER; note = Nucleotide with phosphorothioate linkage
  modified_base 16: mod_base = OTHER; note = 2'-O-methoxyethyl modified nucleotide with phosphorothioate linkage
  modified_base 17: mod_base = OTHER; note = 2'-O-methoxyethyl modified nucleotide with phosphorothioate linkage
  modified_base 18: mod_base = OTHER; note = 2'-O-methoxyethyl modified thymine with phosphorothioate linkage
  modified_base 19: mod_base = OTHER; note = 2'-O-methoxyethyl modified nucleotide with phosphorothioate linkage
  modified_base 20: mod_base = OTHER; note = 2'-O-methoxyethyl 5-methylcytosine
  misc_feature 1..5: note = RNA
  misc_feature 6..15: note = DNA
  misc_feature 16..20: note = RNA
gcagaggtgacgcgaagtgc

SEQ ID NO: 710 - DNA, 20 bp, synthetic construct
  source 1..20: mol_type = other DNA
  modified_base 1: mod_base = OTHER; note = 2'-O-methoxyethyl modified nucleotide with phosphorothioate linkage
  modified_base 2: mod_base = OTHER; note = 2'-O-methoxyethyl 5-methylcytosine with phosphorothioate linkage
  modified_base 3: mod_base = OTHER; note = 2'-O-methoxyethyl modified nucleotide with phosphorothioate linkage
  modified_base 4: mod_base = OTHER; note = 2'-O-methoxyethyl modified nucleotide with phosphorothioate linkage
  modified_base 5: mod_base = OTHER; note = 2'-O-methoxyethyl modified nucleotide with phosphorothioate linkage
  modified_base 6: mod_base = OTHER; note = Nucleotide with phosphorothioate linkage
  modified_base 7: mod_base = OTHER; note = Nucleotide with phosphorothioate linkage
  modified_base 8: mod_base = OTHER; note = Thymine with phosphorothioate linkage
  modified_base 9: mod_base = OTHER; note = Nucleotide with phosphorothioate linkage
  modified_base 10: mod_base = OTHER; note = Nucleotide with phosphorothioate linkage
  modified_base 11: mod_base = OTHER; note = Nucleotide with phosphorothioate linkage
  modified_base 12: mod_base = OTHER; note = Nucleotide with phosphorothioate linkage
  modified_base 13: mod_base = OTHER; note = 5-methylcytosine with phosphorothioate linkage
  modified_base 14: mod_base = OTHER; note = Nucleotide with phosphorothioate linkage
  modified_base 15: mod_base = OTHER; note = Nucleotide with phosphorothioate linkage
  modified_base 16: mod_base = OTHER; note = 2'-O-methoxyethyl modified nucleotide with phosphorothioate linkage
  modified_base 17: mod_base = OTHER; note = 2'-O-methoxyethyl modified nucleotide with phosphorothioate linkage
  modified_base 18: mod_base = OTHER; note = 2'-O-methoxyethyl modified thymine with phosphorothioate linkage
  modified_base 19: mod_base = OTHER; note = 2'-O-methoxyethyl modified nucleotide with phosphorothioate linkage
  modified_base 20: mod_base = OTHER; note = 2'-O-methoxyethyl 5-methylcytosine
  misc_feature 1..5: note = RNA
  misc_feature 6..15: note = DNA
  misc_feature 16..20: note = RNA
gcagaggtgaggcgaagtgc

SEQ ID NO: 711 - DNA, 20 bp, synthetic construct
  source 1..20: mol_type = other DNA
  modified_base 1: mod_base = OTHER; note = 2'-O-methoxyethyl modified nucleotide with phosphorothioate linkage
  modified_base 2: mod_base = OTHER; note = 2'-O-methoxyethyl 5-methylcytosine with phosphorothioate linkage
  modified_base 3: mod_base = OTHER; note = 2'-O-methoxyethyl modified nucleotide with phosphorothioate linkage
  modified_base 4: mod_base = OTHER; note = 2'-O-methoxyethyl modified nucleotide with phosphorothioate linkage
  modified_base 5: mod_base = OTHER; note = 2'-O-methoxyethyl modified nucleotide with phosphorothioate linkage
  modified_base 6: mod_base = OTHER; note = Nucleotide with phosphorothioate linkage
  modified_base 7: mod_base = OTHER; note = Nucleotide with phosphorothioate linkage
  modified_base 8: mod_base = OTHER; note = Thymine with phosphorothioate linkage
  modified_base 9: mod_base = OTHER; note = Nucleotide with phosphorothioate linkage
  modified_base 10: mod_base = OTHER; note = Nucleotide with phosphorothioate linkage
  modified_base 11: mod_base = OTHER; note = Thymine with phosphorothioate linkage
  modified_base 12: mod_base = OTHER; note = Nucleotide with phosphorothioate linkage
  modified_base 13: mod_base = OTHER; note = 5-methylcytosine with phosphorothioate linkage
  modified_base 14: mod_base = OTHER; note = Nucleotide with phosphorothioate linkage
  modified_base 15: mod_base = OTHER; note = Nucleotide with phosphorothioate linkage
  modified_base 16: mod_base = OTHER; note = 2'-O-methoxyethyl modified nucleotide with phosphorothioate linkage
  modified_base 17: mod_base = OTHER; note = 2'-O-methoxyethyl modified nucleotide with phosphorothioate linkage
  modified_base 18: mod_base = OTHER; note = 2'-O-methoxyethyl modified thymine with phosphorothioate linkage
  modified_base 19: mod_base = OTHER; note = 2'-O-methoxyethyl modified nucleotide with phosphorothioate linkage
  modified_base 20: mod_base = OTHER; note = 2'-O-methoxyethyl 5-methylcytosine
  misc_feature 1..5: note = RNA
  misc_feature 6..15: note = DNA
  misc_feature 16..20: note = RNA
gcagaggtgatgcgaagtgc

SEQ ID NO: 712 - DNA, 20 bp, synthetic construct
  source 1..20: mol_type = other DNA
  modified_base 1: mod_base = OTHER; note = 2'-O-methoxyethyl modified nucleotide with phosphorothioate linkage
  modified_base 2: mod_base = OTHER; note = 2'-O-methoxyethyl 5-methylcytosine with phosphorothioate linkage
  modified_base 3: mod_base = OTHER; note = 2'-O-methoxyethyl modified nucleotide with phosphorothioate linkage
  modified_base 4: mod_base = OTHER; note = 2'-O-methoxyethyl modified nucleotide with phosphorothioate linkage
  modified_base 5: mod_base = OTHER; note = 2'-O-methoxyethyl modified nucleotide with phosphorothioate linkage
  modified_base 6: mod_base = OTHER; note = Nucleotide with phosphorothioate linkage
  modified_base 7: mod_base = OTHER; note = Nucleotide with phosphorothioate linkage
  modified_base 8: mod_base = OTHER; note = Thymine with phosphorothioate linkage
  modified_base 9: mod_base = OTHER; note = Nucleotide with phosphorothioate linkage
  modified_base 10: mod_base = OTHER; note = Nucleotide with phosphorothioate linkage
  modified_base 11: mod_base = OTHER; note = Nucleotide with phosphorothioate linkage
  modified_base 12: mod_base = OTHER; note = Nucleotide with phosphorothioate linkage
  modified_base 13: mod_base = OTHER; note = 5-methylcytosine with phosphorothioate linkage
  modified_base 14: mod_base = OTHER; note = Nucleotide with phosphorothioate linkage
  modified_base 15: mod_base = OTHER; note = Nucleotide with phosphorothioate linkage
  modified_base 16: mod_base = OTHER; note = 2'-O-methoxyethyl modified nucleotide with phosphorothioate linkage
  modified_base 17: mod_base = OTHER; note = 2'-O-methoxyethyl modified nucleotide with phosphorothioate linkage
  modified_base 18: mod_base = OTHER; note = 2'-O-methoxyethyl modified thymine with phosphorothioate linkage
  modified_base 19: mod_base = OTHER; note = 2'-O-methoxyethyl modified nucleotide with phosphorothioate linkage
  modified_base 20: mod_base = OTHER; note = 2'-O-methoxyethyl 5-methylcytosine
  misc_feature 1..5: note = RNA
  misc_feature 6..15: note = DNA
  misc_feature 16..20: note = RNA
gcagaggtgaaacgaagtgc

SEQ ID NO: 713 - DNA, 20 bp, synthetic construct
  source 1..20: mol_type = other DNA
  modified_base 1: mod_base = OTHER; note = 2'-O-methoxyethyl modified nucleotide with phosphorothioate linkage
  modified_base 2: mod_base = OTHER; note = 2'-O-methoxyethyl 5-methylcytosine with phosphorothioate linkage
  modified_base 3: mod_base = OTHER; note = 2'-O-methoxyethyl modified nucleotide with phosphorothioate linkage
  modified_base 4: mod_base = OTHER; note = 2'-O-methoxyethyl modified nucleotide with phosphorothioate linkage
  modified_base 5: mod_base = OTHER; note = 2'-O-methoxyethyl modified nucleotide with phosphorothioate linkage
  modified_base 6: mod_base = OTHER; note = Nucleotide with phosphorothioate linkage
  modified_base 7: mod_base = OTHER; note = Nucleotide with phosphorothioate linkage
  modified_base 8: mod_base = OTHER; note = Thymine with phosphorothioate linkage
  modified_base 9: mod_base = OTHER; note = Nucleotide with phosphorothioate linkage
  modified_base 10: mod_base = OTHER; note = Nucleotide with phosphorothioate linkage
  modified_base 11: mod_base = OTHER; note = Nucleotide with phosphorothioate linkage
  modified_base 12: mod_base = OTHER; note = 5-methylcytosine with phosphorothioate linkage
  modified_base 13: mod_base = OTHER; note = 5-methylcytosine with phosphorothioate linkage
  modified_base 14: mod_base = OTHER; note = Nucleotide with phosphorothioate linkage
  modified_base 15: mod_base = OTHER; note = Nucleotide with phosphorothioate linkage
  modified_base 16: mod_base = OTHER; note = 2'-O-methoxyethyl modified nucleotide with phosphorothioate linkage
  modified_base 17: mod_base = OTHER; note = 2'-O-methoxyethyl modified nucleotide with phosphorothioate linkage
  modified_base 18: mod_base = OTHER; note = 2'-O-methoxyethyl modified thymine with phosphorothioate linkage
  modified_base 19: mod_base = OTHER; note = 2'-O-methoxyethyl modified nucleotide with phosphorothioate linkage
  modified_base 20: mod_base = OTHER; note = 2'-O-methoxyethyl 5-methylcytosine
  misc_feature 1..5: note = RNA
  misc_feature 6..15: note = DNA
  misc_feature 16..20: note = RNA
gcagaggtgaaccgaagtgc

SEQ ID NO: 714 - DNA, 20 bp, synthetic construct
  source 1..20: mol_type = other DNA
  modified_base 1: mod_base = OTHER; note = 2'-O-methoxyethyl modified nucleotide with phosphorothioate linkage
  modified_base 2: mod_base = OTHER; note = 2'-O-methoxyethyl 5-methylcytosine with phosphorothioate linkage
  modified_base 3: mod_base = OTHER; note = 2'-O-methoxyethyl modified nucleotide with phosphorothioate linkage
  modified_base 4: mod_base = OTHER; note = 2'-O-methoxyethyl modified nucleotide with phosphorothioate linkage
  modified_base 5: mod_base = OTHER; note = 2'-O-methoxyethyl modified nucleotide with phosphorothioate linkage
  modified_base 6: mod_base = OTHER; note = Nucleotide with phosphorothioate linkage
  modified_base 7: mod_base = OTHER; note = Nucleotide with phosphorothioate linkage
  modified_base 8: mod_base = OTHER; note = Thymine with phosphorothioate linkage
  modified_base 9: mod_base = OTHER; note = Nucleotide with phosphorothioate linkage
  modified_base 10: mod_base = OTHER; note = Nucleotide with phosphorothioate linkage
  modified_base 11: mod_base = OTHER; note = Nucleotide with phosphorothioate linkage
  modified_base 12: mod_base = OTHER; note = Thymine with phosphorothioate linkage
  modified_base 13: mod_base = OTHER; note = 5-methylcytosine with phosphorothioate linkage
  modified_base 14: mod_base = OTHER; note = Nucleotide with phosphorothioate linkage
  modified_base 15: mod_base = OTHER; note = Nucleotide with phosphorothioate linkage
  modified_base 16: mod_base = OTHER; note = 2'-O-methoxyethyl modified nucleotide with phosphorothioate linkage
  modified_base 17: mod_base = OTHER; note = 2'-O-methoxyethyl modified nucleotide with phosphorothioate linkage
  modified_base 18: mod_base = OTHER; note = 2'-O-methoxyethyl modified thymine with phosphorothioate linkage
  modified_base 19: mod_base = OTHER; note = 2'-O-methoxyethyl modified nucleotide with phosphorothioate linkage
  modified_base 20: mod_base = OTHER; note = 2'-O-methoxyethyl 5-methylcytosine
  misc_feature 1..5: note = RNA
  misc_feature 6..15: note = DNA
  misc_feature 16..20: note = RNA
gcagaggtgaatcgaagtgc

SEQ ID NO: 715 - DNA, 20 bp, synthetic construct
  source 1..20: mol_type = other DNA
  modified_base 1: mod_base = OTHER; note = 2'-O-methoxyethyl 5-methylcytosine with phosphorothioate linkage
  modified_base 2: mod_base = OTHER; note = Locked nucleic acid with phosphorothioate linkage
  modified_base 3: mod_base = OTHER; note = 2'-O-methoxyethyl modified nucleotide with phosphorothioate linkage
  modified_base 4: mod_base = OTHER; note = 2'-O-methoxyethyl modified nucleotide with phosphorothioate linkage
  modified_base 5: mod_base = OTHER; note = 2'-O-methoxyethyl modified nucleotide with phosphorothioate linkage
  modified_base 6: mod_base = OTHER; note = Nucleotide with phosphorothioate linkage
  modified_base 7: mod_base = OTHER; note = Thymine with phosphorothioate linkage
  modified_base 8: mod_base = OTHER; note = Nucleotide with phosphorothioate linkage
  modified_base 9: mod_base = OTHER; note = Nucleotide with phosphorothioate linkage
  modified_base 10: mod_base = OTHER; note = Nucleotide with phosphorothioate linkage
  modified_base 11: mod_base = OTHER; note = Nucleotide with phosphorothioate linkage
  modified_base 12: mod_base = OTHER; note = 5-methylcytosine with phosphorothioate linkage
  modified_base 13: mod_base = OTHER; note = Nucleotide with phosphorothioate linkage
  modified_base 14: mod_base = OTHER; note = Nucleotide with phosphorothioate linkage
  modified_base 15: mod_base = OTHER; note = Nucleotide with phosphorothioate linkage
  modified_base 16: mod_base = OTHER; note = 2'-O-methoxyethyl modified nucleotide with phosphorothioate linkage
  modified_base 17: mod_base = OTHER; note = Locked thymine with phosphorothioate linkage
  modified_base 18: mod_base = OTHER; note = 2'-O-methoxyethyl modified nucleotide with R-stereo-defined phosphorothioate linkage
  modified_base 19: mod_base = OTHER; note = 2'-O-methoxyethyl 5-methylcytosine with phosphorothioate linkage
  modified_base 20: mod_base = OTHER; note = 2'-O-methoxyethyl modified nucleotide
  misc_feature 1..5: note = RNA
  misc_feature 6..15: note = DNA
  misc_feature 16..20: note = RNA
cagaggtgaagcgaagtgca

SEQ ID NO: 716 - DNA, 20 bp, synthetic construct
  source 1..20: mol_type = other DNA
  modified_base 1: mod_base = OTHER; note = 2'-O-methoxyethyl 5-methylcytosine with phosphorothioate linkage
  modified_base 2: mod_base = OTHER; note = 2'-O-methoxyethyl modified nucleotide with phosphorothioate linkage
  modified_base 3: mod_base = OTHER; note = Locked nucleic acid with phosphorothioate linkage
  modified_base 4: mod_base = OTHER; note = 2'-O-methoxyethyl modified nucleotide with phosphorothioate linkage
  modified_base 5: mod_base = OTHER; note = 2'-O-methoxyethyl modified nucleotide with phosphorothioate linkage
  modified_base 6: mod_base = OTHER; note = Nucleotide with phosphorothioate linkage
  modified_base 7: mod_base = OTHER; note = Thymine with phosphorothioate linkage
  modified_base 8: mod_base = OTHER; note = Nucleotide with phosphorothioate linkage
  modified_base 9: mod_base = OTHER; note = Nucleotide with phosphorothioate linkage
  modified_base 10: mod_base = OTHER; note = Nucleotide with phosphorothioate linkage
  modified_base 11: mod_base = OTHER; note = Nucleotide with phosphorothioate linkage
  modified_base 12: mod_base = OTHER; note = 5-methylcytosine with phosphorothioate linkage
  modified_base 13: mod_base = OTHER; note = Nucleotide with phosphorothioate linkage
  modified_base 14: mod_base = OTHER; note = Nucleotide with phosphorothioate linkage
  modified_base 15: mod_base = OTHER; note = Nucleotide with phosphorothioate linkage
  modified_base 16: mod_base = OTHER; note = 2'-O-methoxyethyl modified nucleotide with phosphorothioate linkage
  modified_base 17: mod_base = OTHER; note = Locked thymine with phosphorothioate linkage
  modified_base 18: mod_base = OTHER; note = 2'-O-methoxyethyl modified nucleotide with R-stereo-defined phosphorothioate linkage
  modified_base 19: mod_base = OTHER; note = 2'-O-methoxyethyl 5-methylcytosine with phosphorothioate linkage
  modified_base 20: mod_base = OTHER; note = 2'-O-methoxyethyl modified nucleotide
  misc_feature 1..5: note = RNA
  misc_feature 6..15: note = DNA
  misc_feature 16..20: note = RNA
cagaggtgaagcgaagtgca

SEQ ID NO: 717 - DNA, 20 bp, synthetic construct
  source 1..20: mol_type = other DNA
  modified_base 1: mod_base = OTHER; note = 2'-O-methoxyethyl modified nucleotide with phosphorothioate linkage
  modified_base 2: mod_base = OTHER; note = 2'-O-methoxyethyl 5-methylcytosine with phosphorothioate linkage
  modified_base 3: mod_base = OTHER; note = 2'-O-methoxyethyl modified nucleotide with phosphorothioate linkage
  modified_base 4: mod_base = OTHER; note = 2'-O-methoxyethyl modified nucleotide with phosphorothioate linkage
  modified_base 5: mod_base = OTHER; note = 2'-O-methoxyethyl modified nucleotide with phosphorothioate linkage
  modified_base 6: mod_base = OTHER; note = Nucleotide with phosphorothioate linkage
  modified_base 7: mod_base = OTHER; note = Nucleotide with phosphorothioate linkage
  modified_base 8: mod_base = OTHER; note = Thymine with phosphorothioate linkage
  modified_base 9: mod_base = OTHER; note = Nucleotide with phosphorothioate linkage
  modified_base 10: mod_base = OTHER; note = 2'-O-methoxyethyl modified nucleotide with phosphorothioate linkage
  modified_base 11: mod_base = OTHER; note = Nucleotide with phosphorothioate linkage
  modified_base 12: mod_base = OTHER; note = Nucleotide with phosphorothioate linkage
  modified_base 13: mod_base = OTHER; note = 5-methylcytosine with phosphorothioate linkage
  modified_base 14: mod_base = OTHER; note = Nucleotide with phosphorothioate linkage
  modified_base 15: mod_base = OTHER; note = Nucleotide with phosphorothioate linkage
  modified_base 16: mod_base = OTHER; note = 2'-O-methoxyethyl modified nucleotide with phosphorothioate linkage
  modified_base 17: mod_base = OTHER; note = Locked nucleic acid with phosphorothioate linkage
  modified_base 18: mod_base = OTHER; note = 2'-O-methoxyethyl modified thymine with phosphorothioate linkage
  modified_base 19: mod_base = OTHER; note = Locked nucleic acid with phosphorothioate linkage
  modified_base 20: mod_base = OTHER; note = 2'-O-methoxyethyl 5-methylcytosine
  misc_feature 1..5: note = RNA
  misc_feature 6..9: note = DNA
  misc_feature 10: note = RNA
  misc_feature 11..15: note = DNA
  misc_feature 16..20: note = RNA
gcagaggtgaagcgaagtgc

SEQ ID NO: 718 - DNA, 20 bp, synthetic construct
  source 1..20: mol_type = other DNA
  modified_base 1: mod_base = OTHER; note = 2'-O-methoxyethyl modified nucleotide with phosphorothioate linkage
  modified_base 2: mod_base = OTHER; note = 2'-O-methoxyethyl 5-methylcytosine with phosphorothioate linkage
  modified_base 3: mod_base = OTHER; note = 2'-O-methoxyethyl modified nucleotide with phosphorothioate linkage
  modified_base 4: mod_base = OTHER; note = 2'-O-methoxyethyl modified nucleotide with phosphorothioate linkage
  modified_base 5: mod_base = OTHER; note = 2'-O-methoxyethyl modified nucleotide with phosphorothioate linkage
  modified_base 6: mod_base = OTHER; note = Nucleotide with phosphorothioate linkage
  modified_base 7: mod_base = OTHER; note = Nucleotide with phosphorothioate linkage
  modified_base 8: mod_base = OTHER; note = Thymine with phosphorothioate linkage
  modified_base 9: mod_base = OTHER; note = Nucleotide with phosphorothioate linkage
  modified_base 10: mod_base = OTHER; note = 2'-O-methoxyethyl modified nucleotide with phosphorothioate linkage
  modified_base 11: mod_base = OTHER; note = Nucleotide with phosphorothioate linkage
  modified_base 12: mod_base = OTHER; note = Nucleotide with phosphorothioate linkage
  modified_base 13: mod_base = OTHER; note = 5-methylcytosine with phosphorothioate linkage
  modified_base 14: mod_base = OTHER; note = Nucleotide with phosphorothioate linkage
  modified_base 15: mod_base = OTHER; note = Nucleotide with phosphorothioate linkage
  modified_base 16: mod_base = OTHER; note = 2'-O-methoxyethyl modified nucleotide with phosphorothioate linkage
  modified_base 17: mod_base = OTHER; note = Locked nucleic acid with phosphorothioate linkage
  modified_base 18: mod_base = OTHER; note = 2'-O-methoxyethyl modified thymine with phosphorothioate linkage
  modified_base 19: mod_base = OTHER; note = 2'-O-methoxyethyl modified nucleotide with phosphorothioate linkage
  modified_base 20: mod_base = OTHER; note = Locked 5-methylcytosine
  misc_feature 1..5: note = RNA
  misc_feature 6..9: note = DNA
  misc_feature 10: note = RNA
  misc_feature 11..15: note = DNA
  misc_feature 16..20: note = RNA
gcagaggtgaagcgaagtgc

SEQ ID NO: 719 - DNA, 20 bp, synthetic construct
  source 1..20: mol_type = other DNA
  modified_base 1: mod_base = OTHER; note = 2'-O-methoxyethyl modified nucleotide with phosphorothioate linkage
  modified_base 2: mod_base = OTHER; note = 2'-O-methoxyethyl 5-methylcytosine with phosphorothioate linkage
  modified_base 3: mod_base = OTHER; note = 2'-O-methoxyethyl modified nucleotide with phosphorothioate linkage
  modified_base 4: mod_base = OTHER; note = 2'-O-methoxyethyl modified nucleotide with phosphorothioate linkage
  modified_base 5: mod_base = OTHER; note = 2'-O-methoxyethyl modified nucleotide with phosphorothioate linkage
  modified_base 6: mod_base = OTHER; note = Nucleotide with phosphorothioate linkage
  modified_base 7: mod_base = OTHER; note = Nucleotide with phosphorothioate linkage
  modified_base 8: mod_base = OTHER; note = Thymine with phosphorothioate linkage
  modified_base 9: mod_base = OTHER; note = Nucleotide with phosphorothioate linkage
  modified_base 10: mod_base = OTHER; note = 2'-O-methoxyethyl modified nucleotide with phosphorothioate linkage
  modified_base 11: mod_base = OTHER; note = Nucleotide with phosphorothioate linkage
  modified_base 12: mod_base = OTHER; note = Nucleotide with phosphorothioate linkage
  modified_base 13: mod_base = OTHER; note = 5-methylcytosine with phosphorothioate linkage
  modified_base 14: mod_base = OTHER; note = Nucleotide with phosphorothioate linkage
  modified_base 15: mod_base = OTHER; note = Nucleotide with phosphorothioate linkage
  modified_base 16: mod_base = OTHER; note = 2'-O-methoxyethyl modified nucleotide with phosphorothioate linkage
  modified_base 17: mod_base = OTHER; note = 2'-O-methoxyethyl modified nucleotide with phosphorothioate linkage
  modified_base 18: mod_base = OTHER; note = 2'-O-methoxyethyl modified thymine with phosphorothioate linkage
  modified_base 19: mod_base = OTHER; note = Locked nucleic acid with phosphorothioate linkage
  modified_base 20: mod_base = OTHER; note = Locked 5-methylcytosine
  misc_feature 1..5: note = RNA
  misc_feature 6..9: note = DNA
  misc_feature 10: note = RNA
  misc_feature 11..15: note = DNA
  misc_feature 16..20: note = RNA
gcagaggtgaagcgaagtgc

SEQ ID NO: 720 - DNA, 20 bp, synthetic construct
  source 1..20: mol_type = other DNA
  modified_base 1: mod_base = OTHER; note = 2'-O-methoxyethyl modified nucleotide with phosphorothioate linkage
  modified_base 2: mod_base = OTHER; note = 2'-O-methoxyethyl 5-methylcytosine with phosphorothioate linkage
  modified_base 3: mod_base = OTHER; note = 2'-O-methoxyethyl modified nucleotide with phosphorothioate linkage
  modified_base 4: mod_base = OTHER; note = 2'-O-methoxyethyl modified nucleotide with phosphorothioate linkage
  modified_base 5: mod_base = OTHER; note = 2'-O-methoxyethyl modified nucleotide with phosphorothioate linkage
  modified_base 6: mod_base = OTHER; note = Nucleotide with phosphorothioate linkage
  modified_base 7: mod_base = OTHER; note = Nucleotide with phosphorothioate linkage
  modified_base 8: mod_base = OTHER; note = Thymine with phosphorothioate linkage
  modified_base 9: mod_base = OTHER; note = Nucleotide with phosphorothioate linkage
  modified_base 10: mod_base = OTHER; note = 2'-O-methoxyethyl modified nucleotide with phosphorothioate linkage
  modified_base 11: mod_base = OTHER; note = Nucleotide with phosphorothioate linkage
  modified_base 12: mod_base = OTHER; note = Nucleotide with phosphorothioate linkage
  modified_base 13: mod_base = OTHER; note = 5-methylcytosine with phosphorothioate linkage
  modified_base 14: mod_base = OTHER; note = Nucleotide with phosphorothioate linkage
  modified_base 15: mod_base = OTHER; note = Nucleotide with phosphorothioate linkage
  modified_base 16: mod_base = OTHER; note = 2'-O-methoxyethyl modified nucleotide with phosphorothioate linkage
  modified_base 17: mod_base = OTHER; note = Locked nucleic acid with phosphorothioate linkage
  modified_base 18: mod_base = OTHER; note = 2'-O-methoxyethyl modified thymine with phosphorothioate linkage
  modified_base 19: mod_base = OTHER; note = 2'-O-methoxyethyl modified nucleotide with phosphorothioate linkage
  modified_base 20: mod_base = OTHER; note = 2'-O-methoxyethyl 5-methylcytosine
  misc_feature 1..5: note = RNA
  misc_feature 6..9: note = DNA
  misc_feature 10: note = RNA
  misc_feature 11..15: note = DNA
  misc_feature 16..20: note = RNA
gcagaggtgaagcgaagtgc

SEQ ID NO: 721 - DNA, 20 bp, synthetic construct
  source 1..20: mol_type = other DNA
  modified_base 1: mod_base = OTHER; note = 2'-O-methoxyethyl modified nucleotide with phosphorothioate linkage
  modified_base 2: mod_base = OTHER; note = 2'-O-methoxyethyl 5-methylcytosine with phosphorothioate linkage
  modified_base 3: mod_base = OTHER; note = 2'-O-methoxyethyl modified nucleotide with phosphorothioate linkage
  modified_base 4: mod_base = OTHER; note = 2'-O-methoxyethyl modified nucleotide with phosphorothioate linkage
  modified_base 5: mod_base = OTHER; note = 2'-O-methoxyethyl modified nucleotide with phosphorothioate linkage
  modified_base 6: mod_base = OTHER; note = Nucleotide with phosphorothioate linkage
  modified_base 7: mod_base = OTHER; note = Nucleotide with phosphorothioate linkage
  modified_base 8: mod_base = OTHER; note = Thymine with phosphorothioate linkage
  modified_base 9: mod_base = OTHER; note = Nucleotide with phosphorothioate linkage
  modified_base 10: mod_base = OTHER; note = 2'-O-methoxyethyl modified nucleotide with phosphorothioate linkage
  modified_base 11: mod_base = OTHER; note = Nucleotide with phosphorothioate linkage
  modified_base 12: mod_base = OTHER; note = Nucleotide with phosphorothioate linkage
  modified_base 13: mod_base = OTHER; note = 5-methylcytosine with phosphorothioate linkage
  modified_base 14: mod_base = OTHER; note = Nucleotide with phosphorothioate linkage
  modified_base 15: mod_base = OTHER; note = Nucleotide with phosphorothioate linkage
  modified_base 16: mod_base = OTHER; note = 2'-O-methoxyethyl modified nucleotide with phosphorothioate linkage
  modified_base 17: mod_base = OTHER; note = 2'-O-methoxyethyl modified nucleotide with phosphorothioate linkage
  modified_base 18: mod_base = OTHER; note = 2'-O-methoxyethyl modified thymine with phosphorothioate linkage
  modified_base 19: mod_base = OTHER; note = Locked nucleic acid with phosphorothioate linkage
  modified_base 20: mod_base = OTHER; note = 2'-O-methoxyethyl 5-methylcytosine
  misc_feature 1..5: note = RNA
  misc_feature 6..9: note = DNA
  misc_feature 10: note = RNA
  misc_feature 11..15: note = DNA
  misc_feature 16..20: note = RNA
gcagaggtgaagcgaagtgc

SEQ ID NO: 722 - DNA, 20 bp, synthetic construct
  source 1..20: mol_type = other DNA
  modified_base 1: mod_base = OTHER; note = 2'-O-methoxyethyl modified nucleotide with phosphorothioate linkage
  modified_base 2: mod_base = OTHER; note = 2'-O-methoxyethyl 5-methylcytosine with phosphorothioate linkage
  modified_base 3: mod_base = OTHER; note = 2'-O-methoxyethyl modified nucleotide with phosphorothioate linkage
  modified_base 4: mod_base = OTHER; note = 2'-O-methoxyethyl modified nucleotide with phosphorothioate linkage
  modified_base 5: mod_base = OTHER; note = 2'-O-methoxyethyl modified nucleotide with phosphorothioate linkage
  modified_base 6: mod_base = OTHER; note = Nucleotide with phosphorothioate linkage
  modified_base 7: mod_base = OTHER; note = Nucleotide with phosphorothioate linkage
  modified_base 8: mod_base = OTHER; note = Thymine with phosphorothioate linkage
  modified_base 9: mod_base = OTHER; note = Nucleotide with phosphorothioate linkage
  modified_base 10: mod_base = OTHER; note = 2'-O-methoxyethyl modified nucleotide with phosphorothioate linkage
  modified_base 11: mod_base = OTHER; note = Nucleotide with phosphorothioate linkage
  modified_base 12: mod_base = OTHER; note = Nucleotide with phosphorothioate linkage
  modified_base 13: mod_base = OTHER; note = 5-methylcytosine with phosphorothioate linkage
  modified_base 14: mod_base = OTHER; note = Nucleotide with phosphorothioate linkage
  modified_base 15: mod_base = OTHER; note = Nucleotide with phosphorothioate linkage
  modified_base 16: mod_base = OTHER; note = 2'-O-methoxyethyl modified nucleotide with phosphorothioate linkage
  modified_base 17: mod_base = OTHER; note = 2'-O-methoxyethyl modified nucleotide with phosphorothioate linkage
  modified_base 18: mod_base = OTHER; note = 2'-O-methoxyethyl modified thymine with phosphorothioate linkage
  modified_base 19: mod_base = OTHER; note = 2'-O-methoxyethyl modified nucleotide with phosphorothioate linkage
  modified_base 20: mod_base = OTHER; note = Locked 5-methylcytosine
  misc_feature 1..5: note = RNA
  misc_feature 6..9: note = DNA
  misc_feature 10: note = RNA
  misc_feature 11..15: note = DNA
  misc_feature 16..20: note = RNA
gcagaggtgaagcgaagtgc

SEQ ID NO: 723 - DNA, 20 bp, synthetic construct
  source 1..20: mol_type = other DNA
  modified_base 1: mod_base = OTHER; note = 2'-O-methoxyethyl modified nucleotide with phosphorothioate linkage
  modified_base 2: mod_base = OTHER; note = 2'-O-methoxyethyl 5-methylcytosine with phosphorothioate linkage
  modified_base 3: mod_base = OTHER; note = 2'-O-methoxyethyl modified nucleotide with phosphorothioate linkage
  modified_base 4: mod_base = OTHER; note = 2'-O-methoxyethyl modified nucleotide with phosphorothioate linkage
  modified_base 5: mod_base = OTHER; note = 2'-O-methoxyethyl modified nucleotide with phosphorothioate linkage
  modified_base 6: mod_base = OTHER; note = Abasic nucleotide with a phosphorothioate linkage
  modified_base 7: mod_base = OTHER; note = Nucleotide with phosphorothioate linkage
  modified_base 8: mod_base = OTHER; note = Thymine with phosphorothioate linkage
  modified_base 9: mod_base = OTHER; note = Nucleotide with phosphorothioate linkage
  modified_base 10: mod_base = OTHER; note = Nucleotide with phosphorothioate linkage
  modified_base 11: mod_base = OTHER; note = Nucleotide with phosphorothioate linkage
  modified_base 12: mod_base = OTHER; note = Nucleotide with phosphorothioate linkage
  modified_base 13: mod_base = OTHER; note = 5-methylcytosine with phosphorothioate linkage
  modified_base 14: mod_base = OTHER; note = Nucleotide with phosphorothioate linkage
  modified_base 15: mod_base = OTHER; note = Nucleotide with phosphorothioate linkage
  modified_base 16: mod_base = OTHER; note = 2'-O-methoxyethyl modified nucleotide with phosphorothioate linkage
  modified_base 17: mod_base = OTHER; note = 2'-O-methoxyethyl modified nucleotide with phosphorothioate linkage
  modified_base 18: mod_base = OTHER; note = 2'-O-methoxyethyl modified thymine with phosphorothioate linkage
  modified_base 19: mod_base = OTHER; note = 2'-O-methoxyethyl modified nucleotide with phosphorothioate linkage
  modified_base 20: mod_base = OTHER; note = 2'-O-methoxyethyl 5-methylcytosine
  misc_feature 1..5: note = RNA
  misc_feature 6..15: note = DNA
  misc_feature 16..20: note = RNA
gcagangtgaagcgaagtgc

SEQ ID NO: 724 - DNA, 20 bp, synthetic construct
  source 1..20: mol_type = other DNA
  modified_base 1: mod_base = OTHER; note = 2'-O-methoxyethyl modified nucleotide with phosphorothioate linkage
  modified_base 2: mod_base = OTHER; note = 2'-O-methoxyethyl 5-methylcytosine with phosphorothioate linkage
  modified_base 3: mod_base = OTHER; note = 2'-O-methoxyethyl modified nucleotide with phosphorothioate linkage
  modified_base 4: mod_base = OTHER; note = 2'-O-methoxyethyl modified nucleotide with phosphorothioate linkage
  modified_base 5: mod_base = OTHER; note = 2'-O-methoxyethyl modified nucleotide with phosphorothioate linkage
  modified_base 6: mod_base = OTHER; note = Nucleotide with phosphorothioate linkage
  modified_base 7: mod_base = OTHER; note = Abasic nucleotide with a phosphorothioate linkage
  modified_base 8: mod_base = OTHER; note = Thymine with phosphorothioate linkage
  modified_base 9: mod_base = OTHER; note = Nucleotide with phosphorothioate linkage
  modified_base 10: mod_base = OTHER; note = Nucleotide with phosphorothioate linkage
  modified_base 11: mod_base = OTHER; note = Nucleotide with phosphorothioate linkage
  modified_base 12: mod_base = OTHER; note = Nucleotide with phosphorothioate linkage
  modified_base 13: mod_base = OTHER; note = 5-methylcytosine with phosphorothioate linkage
  modified_base 14: mod_base = OTHER; note = Nucleotide with phosphorothioate linkage
  modified_base 15: mod_base = OTHER; note = Nucleotide with phosphorothioate linkage
  modified_base 16: mod_base = OTHER; note = 2'-O-methoxyethyl modified nucleotide with phosphorothioate linkage
  modified_base 17: mod_base = OTHER; note = 2'-O-methoxyethyl modified nucleotide with phosphorothioate linkage
  modified_base 18: mod_base = OTHER; note = 2'-O-methoxyethyl modified thymine with phosphorothioate linkage
  modified_base 19: mod_base = OTHER; note = 2'-O-methoxyethyl modified nucleotide with phosphorothioate linkage
  modified_base 20: mod_base = OTHER; note = 2'-O-methoxyethyl 5-methylcytosine
  misc_feature 1..5: note = RNA
  misc_feature 6..15: note = DNA
  misc_feature 16..20: note = RNA
gcagagntgaagcgaagtgc

SEQ ID NO: 725 - DNA, 20 bp, synthetic construct
  source 1..20: mol_type = other DNA
  modified_base 1: mod_base = OTHER; note = 2'-O-methoxyethyl modified nucleotide with phosphorothioate linkage
  modified_base 2: mod_base = OTHER; note = 2'-O-methoxyethyl 5-methylcytosine with phosphorothioate linkage
  modified_base 3: mod_base = OTHER; note = 2'-O-methoxyethyl modified nucleotide with phosphorothioate linkage
  modified_base 4: mod_base = OTHER; note = 2'-O-methoxyethyl modified nucleotide with phosphorothioate linkage
  modified_base 5: mod_base = OTHER; note = 2'-O-methoxyethyl modified nucleotide with phosphorothioate linkage
  modified_base 6: mod_base = OTHER; note = Nucleotide with phosphorothioate linkage
  modified_base 7: mod_base = OTHER; note = Nucleotide with phosphorothioate linkage
  modified_base 8: mod_base = OTHER; note = Abasic nucleotide with a phosphorothioate linkage
  modified_base 9: mod_base = OTHER; note = Nucleotide with phosphorothioate linkage
  modified_base 10: mod_base = OTHER; note = Nucleotide with phosphorothioate linkage
  modified_base 11: mod_base = OTHER; note = Nucleotide with phosphorothioate linkage
  modified_base 12: mod_base = OTHER; note = Nucleotide with phosphorothioate linkage
  modified_base 13: mod_base = OTHER; note = 5-methylcytosine with phosphorothioate linkage
  modified_base 14: mod_base = OTHER; note = Nucleotide with phosphorothioate linkage
  modified_base 15: mod_base = OTHER; note = Nucleotide with phosphorothioate linkage
  modified_base 16: mod_base = OTHER; note = 2'-O-methoxyethyl modified nucleotide with phosphorothioate linkage
  modified_base 17: mod_base = OTHER; note = 2'-O-methoxyethyl modified nucleotide with phosphorothioate linkage
  modified_base 18: mod_base = OTHER; note = 2'-O-methoxyethyl modified thymine with phosphorothioate linkage
  modified_base 19: mod_base = OTHER; note = 2'-O-methoxyethyl modified nucleotide with phosphorothioate linkage
  modified_base 20: mod_base = OTHER; note = 2'-O-methoxyethyl 5-methylcytosine
  misc_feature 1..5: note = RNA
  misc_feature 6..15: note = DNA
  misc_feature 16..20: note = RNA
gcagaggngaagcgaagtgc

SEQ ID NO: 726 - DNA, 20 bp, synthetic construct
  source 1..20: mol_type = other DNA
  modified_base 1: mod_base = OTHER; note = 2'-O-methoxyethyl modified nucleotide with phosphorothioate linkage
  modified_base 2: mod_base = OTHER; note = 2'-O-methoxyethyl 5-methylcytosine with phosphorothioate linkage
  modified_base 3: mod_base = OTHER; note = 2'-O-methoxyethyl modified nucleotide with phosphorothioate linkage
  modified_base 4: mod_base = OTHER; note = 2'-O-methoxyethyl modified nucleotide with phosphorothioate linkage
  modified_base 5: mod_base = OTHER; note = 2'-O-methoxyethyl modified nucleotide with phosphorothioate linkage
  modified_base 6: mod_base = OTHER; note = Nucleotide with phosphorothioate linkage
  modified_base 7: mod_base = OTHER; note = Nucleotide with phosphorothioate linkage
  modified_base 8: mod_base = OTHER; note = Thymine with phosphorothioate linkage
  modified_base 9: mod_base = OTHER; note = Abasic nucleotide with a phosphorothioate linkage
  modified_base 10: mod_base = OTHER; note = Nucleotide with phosphorothioate linkage
  modified_base 11: mod_base = OTHER; note = Nucleotide with phosphorothioate linkage
  modified_base 12: mod_base = OTHER; note = Nucleotide with phosphorothioate linkage
  modified_base 13: mod_base = OTHER; note = 5-methylcytosine with phosphorothioate linkage
  modified_base 14: mod_base = OTHER; note = Nucleotide with phosphorothioate linkage
  modified_base 15: mod_base = OTHER; note = Nucleotide with phosphorothioate linkage
  modified_base 16: mod_base = OTHER; note = 2'-O-methoxyethyl modified nucleotide with phosphorothioate linkage
  modified_base 17: mod_base = OTHER; note = 2'-O-methoxyethyl modified nucleotide with phosphorothioate linkage
  modified_base 18: mod_base = OTHER; note = 2'-O-methoxyethyl modified thymine with phosphorothioate linkage
  modified_base 19: mod_base = OTHER; note = 2'-O-methoxyethyl modified nucleotide with phosphorothioate linkage
  modified_base 20: mod_base = OTHER; note = 2'-O-methoxyethyl 5-methylcytosine
  misc_feature 1..5: note = RNA
  misc_feature 6..15: note = DNA
  misc_feature 16..20: note = RNA
gcagaggtnaagcgaagtgc

SEQ ID NO: 727 - DNA, 20 bp, synthetic construct
  source 1..20: mol_type = other DNA
  modified_base 1: mod_base = OTHER; note = 2'-O-methoxyethyl modified nucleotide with phosphorothioate linkage
  modified_base 2: mod_base = OTHER; note = 2'-O-methoxyethyl 5-methylcytosine with phosphorothioate linkage
  modified_base 3: mod_base = OTHER; note = 2'-O-methoxyethyl modified nucleotide with phosphorothioate linkage
  modified_base 4: mod_base = OTHER; note = 2'-O-methoxyethyl modified nucleotide with phosphorothioate linkage
  modified_base 5: mod_base = OTHER; note = 2'-O-methoxyethyl modified nucleotide with phosphorothioate linkage
  modified_base 6: mod_base = OTHER; note = Nucleotide with phosphorothioate linkage
  modified_base 7: mod_base = OTHER; note = Nucleotide with phosphorothioate linkage
  modified_base 8: mod_base = OTHER; note = Thymine with phosphorothioate linkage
  modified_base 9: mod_base = OTHER; note = Nucleotide with phosphorothioate linkage
  modified_base 10: mod_base = OTHER; note = Abasic nucleotide with a phosphorothioate linkage
  modified_base 11: mod_base = OTHER; note = Nucleotide with phosphorothioate linkage
  modified_base 12: mod_base = OTHER; note = Nucleotide with phosphorothioate linkage
  modified_base 13: mod_base = OTHER; note = 5-methylcytosine with phosphorothioate linkage
  modified_base 14: mod_base = OTHER; note = Nucleotide with phosphorothioate linkage
  modified_base 15: mod_base = OTHER; note = Nucleotide with phosphorothioate linkage
  modified_base 16: mod_base = OTHER; note = 2'-O-methoxyethyl modified nucleotide with phosphorothioate linkage
  modified_base 17: mod_base = OTHER; note = 2'-O-methoxyethyl modified nucleotide with phosphorothioate linkage
  modified_base 18: mod_base = OTHER; note = 2'-O-methoxyethyl modified thymine with phosphorothioate linkage
  modified_base 19: mod_base = OTHER; note = 2'-O-methoxyethyl modified nucleotide with phosphorothioate linkage
  modified_base 20: mod_base = OTHER; note = 2'-O-methoxyethyl 5-methylcytosine
  misc_feature 1..5: note = RNA
  misc_feature 6..15: note = DNA
  misc_feature 16..20: note = RNA
gcagaggtgnagcgaagtgc

SEQ ID NO: 728 - DNA, 20 bp, synthetic construct
  source 1..20: mol_type = other DNA
  modified_base 1: mod_base = OTHER; note = 2'-O-methoxyethyl modified nucleotide with phosphorothioate linkage
  modified_base 2: mod_base = OTHER; note = 2'-O-methoxyethyl 5-methylcytosine with phosphorothioate linkage
  modified_base 3: mod_base = OTHER; note = 2'-O-methoxyethyl modified nucleotide with phosphorothioate linkage
  modified_base 4: mod_base = OTHER; note = 2'-O-methoxyethyl modified nucleotide with phosphorothioate linkage
  modified_base 5: mod_base = OTHER; note = 2'-O-methoxyethyl modified nucleotide with phosphorothioate linkage
  modified_base 6: mod_base = OTHER; note = Nucleotide with phosphorothioate linkage
  modified_base 7: mod_base = OTHER; note = Nucleotide with phosphorothioate linkage
  modified_base 8: mod_base = OTHER; note = Thymine with phosphorothioate linkage
  modified_base 9: mod_base = OTHER; note = Nucleotide with phosphorothioate linkage
  modified_base 10: mod_base = OTHER; note = Nucleotide with phosphorothioate linkage
  modified_base 11: mod_base = OTHER; note = Abasic nucleotide with a phosphorothioate linkage
  modified_base 12: mod_base = OTHER; note = Nucleotide with phosphorothioate linkage
  modified_base 13: mod_base = OTHER; note = 5-methylcytosine with phosphorothioate linkage
  modified_base 14: mod_base = OTHER; note = Nucleotide with phosphorothioate linkage
  modified_base 15: mod_base = OTHER; note = Nucleotide with phosphorothioate linkage
  modified_base 16: mod_base = OTHER; note = 2'-O-methoxyethyl modified nucleotide with phosphorothioate linkage
  modified_base 17: mod_base = OTHER; note = 2'-O-methoxyethyl modified nucleotide with phosphorothioate linkage
  modified_base 18: mod_base = OTHER; note = 2'-O-methoxyethyl modified thymine with phosphorothioate linkage
  modified_base 19: mod_base = OTHER; note = 2'-O-methoxyethyl modified nucleotide with phosphorothioate linkage
  modified_base 20: mod_base = OTHER; note = 2'-O-methoxyethyl 5-methylcytosine
  misc_feature 1..5: note = RNA
  misc_feature 6..15: note = DNA
  misc_feature 16..20: note = RNA
gcagaggtgangcgaagtgc

SEQ ID NO: 729 - DNA, 20 bp, synthetic construct
  source 1..20: mol_type = other DNA
  modified_base 1: mod_base = OTHER; note = 2'-O-methoxyethyl modified nucleotide with phosphorothioate linkage
  modified_base 2: mod_base = OTHER; note = 2'-O-methoxyethyl 5-methylcytosine with phosphorothioate linkage
  modified_base 3: mod_base = OTHER; note = 2'-O-methoxyethyl modified nucleotide with phosphorothioate linkage
  modified_base 4: mod_base = OTHER; note = 2'-O-methoxyethyl modified nucleotide with phosphorothioate linkage
  modified_base 5: mod_base = OTHER; note = 2'-O-methoxyethyl modified nucleotide with phosphorothioate linkage
  modified_base 6: mod_base = OTHER; note = Nucleotide with phosphorothioate linkage
  modified_base 7: mod_base = OTHER; note = Nucleotide with phosphorothioate linkage
  modified_base 8: mod_base = OTHER; note = Thymine with phosphorothioate linkage
  modified_base 9: mod_base = OTHER; note = Nucleotide with phosphorothioate linkage
  modified_base 10: mod_base = OTHER; note = Nucleotide with phosphorothioate linkage
  modified_base 11: mod_base = OTHER; note = Nucleotide with phosphorothioate linkage
  modified_base 12: mod_base = OTHER; note = Abasic nucleotide with a phosphorothioate linkage
  modified_base 13: mod_base = OTHER; note = 5-methylcytosine with phosphorothioate linkage
  modified_base 14: mod_base = OTHER; note = Nucleotide with phosphorothioate linkage
  modified_base 15: mod_base = OTHER; note = Nucleotide with phosphorothioate linkage
  modified_base 16: mod_base = OTHER; note = 2'-O-methoxyethyl modified nucleotide with phosphorothioate linkage
  modified_base 17: mod_base = OTHER; note = 2'-O-methoxyethyl modified nucleotide with phosphorothioate linkage
  modified_base 18: mod_base = OTHER; note = 2'-O-methoxyethyl modified thymine with phosphorothioate linkage
  modified_base 19: mod_base = OTHER; note = 2'-O-methoxyethyl modified nucleotide with phosphorothioate linkage
  modified_base 20: mod_base = OTHER; note = 2'-O-methoxyethyl 5-methylcytosine
  misc_feature 1..5: note = RNA
  misc_feature 6..15: note = DNA
  misc_feature 16..20: note = RNA
gcagaggtgaancgaagtgc

SEQ ID NO: 730 - DNA, 20 bp, synthetic construct
  source 1..20: mol_type = other DNA
  modified_base 1: mod_base = OTHER; note = 2'-O-methoxyethyl modified nucleotide with phosphorothioate linkage
  modified_base 2: mod_base = OTHER; note = 2'-O-methoxyethyl 5-methylcytosine with phosphorothioate linkage
  modified_base 3: mod_base = OTHER; note = 2'-O-methoxyethyl modified nucleotide with phosphorothioate linkage
  modified_base 4: mod_base = OTHER; note = 2'-O-methoxyethyl modified nucleotide with phosphorothioate linkage
  modified_base 5: mod_base = OTHER; note = 2'-O-methoxyethyl modified nucleotide with phosphorothioate linkage
  modified_base 6: mod_base = OTHER; note = Nucleotide with phosphorothioate linkage
  modified_base 7: mod_base = OTHER; note = Nucleotide with phosphorothioate linkage
  modified_base 8: mod_base = OTHER; note = Thymine with phosphorothioate linkage
  modified_base 9: mod_base = OTHER; note = Nucleotide with phosphorothioate linkage
  modified_base 10: mod_base = OTHER; note = Nucleotide with phosphorothioate linkage
  modified_base 11: mod_base = OTHER; note = Nucleotide with phosphorothioate linkage
  modified_base 12: mod_base = OTHER; note = Nucleotide with phosphorothioate linkage
  modified_base 13: mod_base = OTHER; note = Abasic nucleotide with a phosphorothioate linkage
  modified_base 14: mod_base = OTHER; note = Nucleotide with phosphorothioate linkage
  modified_base 15: mod_base = OTHER; note = Nucleotide with phosphorothioate linkage
  modified_base 16: mod_base = OTHER; note = 2'-O-methoxyethyl modified nucleotide with phosphorothioate linkage
  modified_base 17: mod_base = OTHER; note = 2'-O-methoxyethyl modified nucleotide with phosphorothioate linkage
  modified_base 18: mod_base = OTHER; note = 2'-O-methoxyethyl modified thymine with phosphorothioate linkage
  modified_base 19: mod_base = OTHER; note = 2'-O-methoxyethyl modified nucleotide with phosphorothioate linkage
  modified_base 20: mod_base = OTHER; note = 2'-O-methoxyethyl 5-methylcytosine
  misc_feature 1..5: note = RNA
  misc_feature 6..15: note = DNA
  misc_feature 16..20: note = RNA
gcagaggtgaagngaagtgc

SEQ ID NO: 731 - DNA, 20 bp, synthetic construct
  source 1..20: mol_type = other DNA
  modified_base 1: mod_base = OTHER; note = 2'-O-methoxyethyl modified nucleotide with phosphorothioate linkage
  modified_base 2: mod_base = OTHER; note = 2'-O-methoxyethyl 5-methylcytosine with phosphorothioate linkage
  modified_base 3: mod_base = OTHER; note = 2'-O-methoxyethyl modified nucleotide with phosphorothioate linkage
  modified_base 4: mod_base = OTHER; note = 2'-O-methoxyethyl modified nucleotide with phosphorothioate linkage
  modified_base 5: mod_base = OTHER; note = 2'-O-methoxyethyl modified nucleotide with phosphorothioate linkage
  modified_base 6: mod_base = OTHER; note = Nucleotide with phosphorothioate linkage
  modified_base 7: mod_base = OTHER; note = Nucleotide with phosphorothioate linkage
  modified_base 8: mod_base = OTHER; note = Thymine with phosphorothioate linkage
  modified_base 9: mod_base = OTHER; note = Nucleotide with phosphorothioate linkage
  modified_base 10: mod_base = OTHER; note = Nucleotide with phosphorothioate linkage
  modified_base 11: mod_base = OTHER; note = Nucleotide with phosphorothioate linkage
  modified_base 12: mod_base = OTHER; note = Nucleotide with phosphorothioate linkage
  modified_base 13: mod_base = OTHER; note = 5-methylcytosine with phosphorothioate linkage
  modified_base 14: mod_base = OTHER; note = Abasic nucleotide with a phosphorothioate linkage
  modified_base 15: mod_base = OTHER; note = Nucleotide with phosphorothioate linkage
  modified_base 16: mod_base = OTHER; note = 2'-O-methoxyethyl modified nucleotide with phosphorothioate linkage
  modified_base 17: mod_base = OTHER; note = 2'-O-methoxyethyl modified nucleotide with phosphorothioate linkage
  modified_base 18: mod_base = OTHER; note = 2'-O-methoxyethyl modified thymine with phosphorothioate linkage
  modified_base 19: mod_base = OTHER; note = 2'-O-methoxyethyl modified nucleotide with phosphorothioate linkage
  modified_base 20: mod_base = OTHER; note = 2'-O-methoxyethyl 5-methylcytosine
  misc_feature 1..5: note = RNA
  misc_feature 6..15: note = DNA
  misc_feature 16..20: note = RNA
gcagaggtgaagcnaagtgc

SEQ ID NO: 732 - DNA, 20 bp, synthetic construct
  source 1..20: mol_type = other DNA
  modified_base 1: mod_base = OTHER; note = 2'-O-methoxyethyl modified nucleotide with phosphorothioate linkage
  modified_base 2: mod_base = OTHER; note = 2'-O-methoxyethyl 5-methylcytosine with phosphorothioate linkage
  modified_base 3: mod_base = OTHER; note = 2'-O-methoxyethyl modified nucleotide with phosphorothioate linkage
  modified_base 4: mod_base = OTHER; note = 2'-O-methoxyethyl modified nucleotide with phosphorothioate linkage
  modified_base 5: mod_base = OTHER; note = 2'-O-methoxyethyl modified nucleotide with phosphorothioate linkage
  modified_base 6: mod_base = OTHER; note = Nucleotide with phosphorothioate linkage
  modified_base 7: mod_base = OTHER; note = Nucleotide with phosphorothioate linkage
  modified_base 8: mod_base = OTHER; note = Thymine with phosphorothioate linkage
  modified_base 9: mod_base = OTHER; note = Nucleotide with phosphorothioate linkage
  modified_base 10: mod_base = OTHER; note = Nucleotide with phosphorothioate linkage
  modified_base 11: mod_base = OTHER; note = Nucleotide with phosphorothioate linkage
  modified_base 12: mod_base = OTHER; note = Nucleotide with phosphorothioate linkage
  modified_base 13: mod_base = OTHER; note = 5-methylcytosine with phosphorothioate linkage
  modified_base 14: mod_base = OTHER; note = Nucleotide with phosphorothioate linkage
  modified_base 15: mod_base = OTHER; note = Abasic nucleotide with a phosphorothioate linkage
  modified_base 16: mod_base = OTHER; note = 2'-O-methoxyethyl modified nucleotide with phosphorothioate linkage
  modified_base 17: mod_base = OTHER; note = 2'-O-methoxyethyl modified nucleotide with phosphorothioate linkage
  modified_base 18: mod_base = OTHER; note = 2'-O-methoxyethyl modified thymine with phosphorothioate linkage
  modified_base 19: mod_base = OTHER; note = 2'-O-methoxyethyl modified nucleotide with phosphorothioate linkage
  modified_base 20: mod_base = OTHER; note = 2'-O-methoxyethyl 5-methylcytosine
  misc_feature 1..5: note = RNA
  misc_feature 6..15: note = DNA
  misc_feature 16..20: note = RNA
gcagaggtgaagcgnagtgc

SEQ ID NO: 733 - DNA, 20 bp, synthetic construct
  source 1..20: mol_type = other DNA
  modified_base 1: mod_base = OTHER; note = 2'-O-methoxyethyl 5-methylcytosine with phosphorothioate linkage
  modified_base 2: mod_base = OTHER; note = 2'-O-methoxyethyl modified nucleotide with phosphorothioate linkage
  modified_base 3: mod_base = OTHER; note = 2'-O-methoxyethyl modified nucleotide with phosphorothioate linkage
  modified_base 4: mod_base = OTHER; note = 2'-O-methoxyethyl modified nucleotide with phosphorothioate linkage
  modified_base 5: mod_base = OTHER; note = 2'-O-methoxyethyl modified nucleotide with phosphorothioate linkage
  modified_base 6: mod_base = OTHER; note = Nucleotide with phosphorothioate linkage
  modified_base 7: mod_base = OTHER; note = Thymine with phosphorothioate linkage
  modified_base 8: mod_base = OTHER; note = Nucleotide with phosphorothioate linkage
  modified_base 9: mod_base = OTHER; note = Nucleotide with phosphorothioate linkage
  modified_base 10: mod_base = OTHER; note = Nucleotide with phosphorothioate linkage
  modified_base 11: mod_base = OTHER; note = Nucleotide with phosphorothioate linkage
  modified_base 12: mod_base = OTHER; note = 5-methylcytosine with phosphorothioate linkage
  modified_base 13: mod_base = OTHER; note = Nucleotide with phosphorothioate linkage
  modified_base 14: mod_base = OTHER; note = Nucleotide with phosphorothioate linkage
  modified_base 15: mod_base = OTHER; note = Nucleotide with phosphorothioate linkage
  modified_base 16: mod_base = OTHER; note = 2'-O-methoxyethyl modified nucleotide with phosphorothioate linkage
  modified_base 17: mod_base = OTHER; note = Tert-butylguanidine bridged thymine with phosphorothioate linkage
  modified_base 18: mod_base = OTHER; note = 2'-O-methoxyethyl modified nucleotide with phosphorothioate linkage
  modified_base 19: mod_base = OTHER; note = 2'-O-methoxyethyl 5-methylcytosine with phosphorothioate linkage
  modified_base 20: mod_base = OTHER; note = 2'-O-methoxyethyl modified nucleotide
  misc_feature 1..5: note = RNA
  misc_feature 6..15: note = DNA
  misc_feature 16..20: note = RNA
cagaggtgaagcgaagtgca

SEQ ID NO: 734 - DNA, 20 bp, synthetic construct
  source 1..20: mol_type = other DNA
  modified_base 1: mod_base = OTHER; note = 2'-O-methoxyethyl 5-methylcytosine with phosphorothioate linkage
  modified_base 2: mod_base = OTHER; note = 2'-O-methoxyethyl modified nucleotide with phosphorothioate linkage
  modified_base 3: mod_base = OTHER; note = 2'-O-methoxyethyl modified nucleotide with phosphorothioate linkage
  modified_base 4: mod_base = OTHER; note = 2'-O-methoxyethyl modified nucleotide with phosphorothioate linkage
  modified_base 5: mod_base = OTHER; note = 2'-O-methoxyethyl modified nucleotide with phosphorothioate linkage
  modified_base 6: mod_base = OTHER; note = Nucleotide with phosphorothioate linkage
  modified_base 7: mod_base = OTHER; note = Thymine with phosphorothioate linkage
  modified_base 8: mod_base = OTHER; note = Nucleotide with phosphorothioate linkage
  modified_base 9: mod_base = OTHER; note = Nucleotide with phosphorothioate linkage
  modified_base 10: mod_base = OTHER; note = Nucleotide with phosphorothioate linkage
  modified_base 11: mod_base = OTHER; note = Nucleotide with phosphorothioate linkage
  modified_base 12: mod_base = OTHER; note = 5-methylcytosine with phosphorothioate linkage
  modified_base 13: mod_base = OTHER; note = Nucleotide with phosphorothioate linkage
  modified_base 14: mod_base = OTHER; note = Nucleotide with phosphorothioate linkage
  modified_base 15: mod_base = OTHER; note = Nucleotide with phosphorothioate linkage
  modified_base 16: mod_base = OTHER; note = 2'-O-methoxyethyl modified nucleotide with phosphorothioate linkage
  modified_base 17: mod_base = OTHER; note = 2'-O-methoxyethyl modified thymine with phosphorothioate linkage
  modified_base 18: mod_base = OTHER; note = Tert-butylguanidine bridged nucleic acid with phosphorothioate linkage
  modified_base 19: mod_base = OTHER; note = 2'-O-methoxyethyl 5-methylcytosine with phosphorothioate linkage
  modified_base 20: mod_base = OTHER; note = 2'-O-methoxyethyl modified nucleotide
  misc_feature 1..5: note = RNA
  misc_feature 6..15: note = DNA
  misc_feature 16..20: note = RNA
cagaggtgaagcgaagtgca

SEQ ID NO: 735 - DNA, 20 bp, synthetic construct
  source 1..20: mol_type = other DNA
  modified_base 1: mod_base = OTHER; note = 2'-O-methoxyethyl 5-methylcytosine with phosphorothioate linkage
  modified_base 2: mod_base = OTHER; note = 2'-O-methoxyethyl modified nucleotide with phosphorothioate linkage
  modified_base 3: mod_base = OTHER; note = 2'-O-methoxyethyl modified nucleotide with phosphorothioate linkage
  modified_base 4: mod_base = OTHER; note = 2'-O-methoxyethyl modified nucleotide with phosphorothioate linkage
  modified_base 5: mod_base = OTHER; note = 2'-O-methoxyethyl modified nucleotide with phosphorothioate linkage
  modified_base 6: mod_base = OTHER; note = Nucleotide with phosphorothioate linkage
  modified_base 7: mod_base = OTHER; note = Thymine with phosphorothioate linkage
  modified_base 8: mod_base = OTHER; note = Nucleotide with phosphorothioate linkage
  modified_base 9: mod_base = OTHER; note = Nucleotide with phosphorothioate linkage
  modified_base 10: mod_base = OTHER; note = Nucleotide with phosphorothioate linkage
  modified_base 11: mod_base = OTHER; note = Nucleotide with phosphorothioate linkage
  modified_base 12: mod_base = OTHER; note = 5-methylcytosine with phosphorothioate linkage
  modified_base 13: mod_base = OTHER; note = Nucleotide with phosphorothioate linkage
  modified_base 14: mod_base = OTHER; note = Nucleotide with phosphorothioate linkage
  modified_base 15: mod_base = OTHER; note = Nucleotide with phosphorothioate linkage
  modified_base 16: mod_base = OTHER; note = 2'-O-methoxyethyl modified nucleotide with phosphorothioate linkage
  modified_base 17: mod_base = OTHER; note = 2'-O-methoxyethyl modified thymine with phosphorothioate linkage
  modified_base 18: mod_base = OTHER; note = 2'-O-methoxyethyl modified nucleotide with phosphorothioate linkage
  modified_base 19: mod_base = OTHER; note = Tert-butylguanidine bridged 5-methylcytosine with phosphorothioate linkage
  modified_base 20: mod_base = OTHER; note = 2'-O-methoxyethyl modified nucleotide
  misc_feature 1..5: note = RNA
  misc_feature 6..15: note = DNA
  misc_feature 16..20: note = RNA
cagaggtgaagcgaagtgca

SEQ ID NO: 736 - DNA, 20 bp, synthetic construct
  source 1..20: mol_type = other DNA
  modified_base 1: mod_base = OTHER; note = 2'-O-methoxyethyl 5-methylcytosine with phosphorothioate linkage
  modified_base 2: mod_base = OTHER; note = Tert-butylguanidine bridged nucleotide with phosphorothioate linkage
  modified_base 3: mod_base = OTHER; note = 2'-O-methoxyethyl modified nucleotide with phosphorothioate linkage
  modified_base 4: mod_base = OTHER; note = 2'-O-methoxyethyl modified nucleotide with phosphorothioate linkage
  modified_base 5: mod_base = OTHER; note = 2'-O-methoxyethyl modified nucleotide with phosphorothioate linkage
  modified_base 6: mod_base = OTHER; note = Nucleotide with phosphorothioate linkage
  modified_base 7: mod_base = OTHER; note = Thymine with phosphorothioate linkage
  modified_base 8: mod_base = OTHER; note = Nucleotide with phosphorothioate linkage
  modified_base 9: mod_base = OTHER; note = Nucleotide with phosphorothioate linkage
  modified_base 10: mod_base = OTHER; note = Nucleotide with phosphorothioate linkage
  modified_base 11: mod_base = OTHER; note = Nucleotide with phosphorothioate linkage
  modified_base 12: mod_base = OTHER; note = 5-methylcytosine with phosphorothioate linkage
  modified_base 13: mod_base = OTHER; note = Nucleotide with phosphorothioate linkage
  modified_base 14: mod_base = OTHER; note = Nucleotide with phosphorothioate linkage
  modified_base 15: mod_base = OTHER; note = Nucleotide with phosphorothioate linkage
  modified_base 16: mod_base = OTHER; note = 2'-O-methoxyethyl modified nucleotide with phosphorothioate linkage
  modified_base 17: mod_base = OTHER; note = 2'-O-methoxyethyl modified thymine with phosphorothioate linkage
  modified_base 18: mod_base = OTHER; note = 2'-O-methoxyethyl modified nucleotide with phosphorothioate linkage
  modified_base 19: mod_base = OTHER; note = Tert-butylguanidine bridged 5-methylcytosine with phosphorothioate linkage
  modified_base 20: mod_base = OTHER; note = 2'-O-methoxyethyl modified nucleotide
  misc_feature 1..5: note = RNA
  misc_feature 6..15: note = DNA
  misc_feature 16..20: note = RNA
cagaggtgaagcgaagtgca

SEQ ID NO: 737 - DNA, 20 bp, synthetic construct
  source 1..20: mol_type = other DNA
  modified_base 1: mod_base = OTHER; note = 2'-O-methoxyethyl modified nucleotide with phosphorothioate linkage
  modified_base 2: mod_base = OTHER; note = Tert-butylguanidine bridged 5-methylcytosine with phosphorothioate linkage
  modified_base 3: mod_base = OTHER; note = 2'-O-methoxyethyl modified nucleotide with phosphorothioate linkage
  modified_base 4: mod_base = OTHER; note = 2'-O-methoxyethyl modified nucleotide with phosphorothioate linkage
  modified_base 5: mod_base = OTHER; note = Nucleotide with phosphorothioate linkage
  modified_base 6: mod_base = OTHER; note = Nucleotide with phosphorothioate linkage
  modified_base 7: mod_base = OTHER; note = Nucleotide with phosphorothioate linkage
  modified_base 8: mod_base = OTHER; note = Thymine with phosphorothioate linkage
  modified_base 9: mod_base = OTHER; note = Nucleotide with phosphorothioate linkage
  modified_base 10: mod_base = OTHER; note = 2'-O-methyl modified abasic nucleotide with phosphorothioate linkage
  modified_base 11: mod_base = OTHER; note = Nucleotide with phosphorothioate linkage
  modified_base 12: mod_base = OTHER; note = Nucleotide with phosphorothioate linkage
  modified_base 13: mod_base = OTHER; note = 5-methylcytosine with phosphorothioate linkage
  modified_base 14: mod_base = OTHER; note = Nucleotide with phosphorothioate linkage
  modified_base 15: mod_base = OTHER; note = Nucleotide with phosphorothioate linkage
  modified_base 16: mod_base = OTHER; note = 2'-O-methoxyethyl modified nucleotide with phosphorothioate linkage
  modified_base 17: mod_base = OTHER; note = 2'-O-methoxyethyl modified nucleotide with phosphorothioate linkage
  modified_base 18: mod_base = OTHER; note = 2'-O-methoxyethyl modified thymine with phosphorothioate linkage
  modified_base 19: mod_base = OTHER; note = 2'-O-methoxyethyl modified nucleotide with phosphorothioate linkage
  modified_base 20: mod_base = OTHER; note = 2'-O-methoxyethyl 5-methylcytosine
  misc_feature 1..4: note = RNA
  misc_feature 5..9: note = DNA
  misc_feature 10: note = RNA
  misc_feature 11..15: note = DNA
  misc_feature 16..20: note = RNA
gcagaggtgnagcgaagtgc

SEQ ID NO: 738 - DNA, 20 bp, synthetic construct
  source 1..20: mol_type = other DNA
  modified_base 1: mod_base = OTHER; note = 2'-O-methoxyethyl modified nucleotide with phosphorothioate linkage
  modified_base 2: mod_base = OTHER; note = 2'-O-methoxyethyl 5-methylcytosine with phosphorothioate linkage
  modified_base 3: mod_base = OTHER; note = Tert-butylguanidine bridged nucleotide with phosphorothioate linkage
  modified_base 4: mod_base = OTHER; note = 2'-O-methoxyethyl modified nucleotide with phosphorothioate linkage
  modified_base 5: mod_base = OTHER; note = Nucleotide with phosphorothioate linkage
  modified_base 6: mod_base = OTHER; note = Nucleotide with phosphorothioate linkage
  modified_base 7: mod_base = OTHER; note = Nucleotide with phosphorothioate linkage
  modified_base 8: mod_base = OTHER; note = Thymine with phosphorothioate linkage
  modified_base 9: mod_base = OTHER; note = Nucleotide with phosphorothioate linkage
  modified_base 10: mod_base = OTHER; note = 2'-O-methyl modified abasic nucleotide with phosphorothioate linkage
  modified_base 11: mod_base = OTHER; note = Nucleotide with phosphorothioate linkage
  modified_base 12: mod_base = OTHER; note = Nucleotide with phosphorothioate linkage
  modified_base 13: mod_base = OTHER; note = 5-methylcytosine with phosphorothioate linkage
  modified_base 14: mod_base = OTHER; note = Nucleotide with phosphorothioate linkage
  modified_base 15: mod_base = OTHER; note = Nucleotide with phosphorothioate linkage
  modified_base 16: mod_base = OTHER; note = 2'-O-methoxyethyl modified nucleotide with phosphorothioate linkage
  modified_base 17: mod_base = OTHER; note = 2'-O-methoxyethyl modified nucleotide with phosphorothioate linkage
  modified_base 18: mod_base = OTHER; note = 2'-O-methoxyethyl modified thymine with phosphorothioate linkage
  modified_base 19: mod_base = OTHER; note = 2'-O-methoxyethyl modified nucleotide with phosphorothioate linkage
  modified_base 20: mod_base = OTHER; note = 2'-O-methoxyethyl 5-methylcytosine
  misc_feature 1..4: note = RNA
  misc_feature 5..9: note = DNA
  misc_feature 10: note = RNA
  misc_feature 11..15: note = DNA
  misc_feature 16..20: note = RNA
gcagaggtgnagcgaagtgc

SEQ ID NO: 739 - DNA, 20 bp, synthetic construct
  source 1..20: mol_type = other DNA
  modified_base 1: mod_base = OTHER; note = 2'-O-methoxyethyl modified nucleotide with phosphorothioate linkage
  modified_base 2: mod_base = OTHER; note = 2'-O-methoxyethyl 5-methylcytosine with phosphorothioate linkage
  modified_base 3: mod_base = OTHER; note = 2'-O-methoxyethyl modified nucleotide with phosphorothioate linkage
  modified_base 4: mod_base = OTHER; note = 2'-O-methoxyethyl modified nucleotide with phosphorothioate linkage
  modified_base 5: mod_base = OTHER; note = Nucleotide with phosphorothioate linkage
  modified_base 6: mod_base = OTHER; note = Nucleotide with phosphorothioate linkage
  modified_base 7: mod_base = OTHER; note = Nucleotide with phosphorothioate linkage
  modified_base 8: mod_base = OTHER; note = Thymine with phosphorothioate linkage
  modified_base 9: mod_base = OTHER; note = Nucleotide with phosphorothioate linkage
  modified_base 10: mod_base = OTHER; note = 2'-O-methyl modified abasic nucleotide with phosphorothioate linkage
  modified_base 11: mod_base = OTHER; note = Nucleotide with phosphorothioate linkage
  modified_base 12: mod_base = OTHER; note = Nucleotide with phosphorothioate linkage
  modified_base 13: mod_base = OTHER; note = 5-methylcytosine with phosphorothioate linkage
  modified_base 14: mod_base = OTHER; note = Nucleotide with phosphorothioate linkage
  modified_base 15: mod_base = OTHER; note = Nucleotide with phosphorothioate linkage
  modified_base 16: mod_base = OTHER; note = Tert-butylguanidine bridged nucleotide with phosphorothioate linkage
  modified_base 17: mod_base = OTHER; note = 2'-O-methoxyethyl modified nucleotide with phosphorothioate linkage
  modified_base 18: mod_base = OTHER; note = 2'-O-methoxyethyl modified thymine with phosphorothioate linkage
  modified_base 19: mod_base = OTHER; note = 2'-O-methoxyethyl modified nucleotide with phosphorothioate linkage
  modified_base 20: mod_base = OTHER; note = 2'-O-methoxyethyl 5-methylcytosine
  misc_feature 1..4: note = RNA
  misc_feature 5..9: note = DNA
  misc_feature 10: note = RNA
  misc_feature 11..15: note = DNA
  misc_feature 16..20: note = RNA
gcagaggtgnagcgaagtgc

SEQ ID NO: 740 - DNA, 20 bp, synthetic construct
  source 1..20: mol_type = other DNA
  modified_base 1: mod_base = OTHER; note = 2'-O-methoxyethyl modified nucleotide with phosphorothioate linkage
  modified_base 2: mod_base = OTHER; note = 2'-O-methoxyethyl 5-methylcytosine with phosphorothioate linkage
  modified_base 3: mod_base = OTHER; note = 2'-O-methoxyethyl modified nucleotide with phosphorothioate linkage
  modified_base 4: mod_base = OTHER; note = 2'-O-methoxyethyl modified nucleotide with phosphorothioate linkage
  modified_base 5: mod_base = OTHER; note = Nucleotide with phosphorothioate linkage
  modified_base 6: mod_base = OTHER; note = Nucleotide with phosphorothioate linkage
  modified_base 7: mod_base = OTHER; note = Nucleotide with phosphorothioate linkage
  modified_base 8: mod_base = OTHER; note = Thymine with phosphorothioate linkage
  modified_base 9: mod_base = OTHER; note = Nucleotide with phosphorothioate linkage
  modified_base 10: mod_base = OTHER; note = 2'-O-methyl modified abasic nucleotide with phosphorothioate linkage
  modified_base 11: mod_base = OTHER; note = Nucleotide with phosphorothioate linkage
  modified_base 12: mod_base = OTHER; note = Nucleotide with phosphorothioate linkage
  modified_base 13: mod_base = OTHER; note = 5-methylcytosine with phosphorothioate linkage
  modified_base 14: mod_base = OTHER; note = Nucleotide with phosphorothioate linkage
  modified_base 15: mod_base = OTHER; note = Nucleotide with phosphorothioate linkage
  modified_base 16: mod_base = OTHER; note = 2'-O-methoxyethyl modified nucleotide with phosphorothioate linkage
  modified_base 17: mod_base = OTHER; note = 2'-O-methoxyethyl modified nucleotide with phosphorothioate linkage
  modified_base 18: mod_base = OTHER; note = Tert-butylguanidine bridged thymine with phosphorothioate linkage
  modified_base 19: mod_base = OTHER; note = 2'-O-methoxyethyl modified nucleotide with phosphorothioate linkage
  modified_base 20: mod_base = OTHER; note = 2'-O-methoxyethyl 5-methylcytosine
  misc_feature 1..4: note = RNA
  misc_feature 5..9: note = DNA
  misc_feature 10: note = RNA
  misc_feature 11..15: note = DNA
  misc_feature 16..20: note = RNA
gcagaggtgnagcgaagtgc

SEQ ID NO: 741 - DNA, 20 bp, synthetic construct
  source 1..20: mol_type = other DNA
  modified_base 1: mod_base = OTHER; note = 2'-O-methoxyethyl modified nucleotide with phosphorothioate linkage
  modified_base 2: mod_base = OTHER; note = 2'-O-methoxyethyl 5-methylcytosine with phosphorothioate linkage
  modified_base 3: mod_base = OTHER; note = 2'-O-methoxyethyl modified nucleotide with phosphorothioate linkage
  modified_base 4: mod_base = OTHER; note = 2'-O-methoxyethyl modified nucleotide with phosphorothioate linkage
  modified_base 5: mod_base = OTHER; note = Nucleotide with phosphorothioate linkage
  modified_base 6: mod_base = OTHER; note = Nucleotide with phosphorothioate linkage
  modified_base 7: mod_base = OTHER; note = Nucleotide with phosphorothioate linkage
  modified_base 8: mod_base = OTHER; note = Thymine with phosphorothioate linkage
  modified_base 9: mod_base = OTHER; note = Nucleotide with phosphorothioate linkage
  modified_base 10: mod_base = OTHER; note = 2'-O-methyl modified abasic nucleotide with phosphorothioate linkage
  modified_base 11: mod_base = OTHER; note = Nucleotide with phosphorothioate linkage
  modified_base 12: mod_base = OTHER; note = Nucleotide with phosphorothioate linkage
  modified_base 13: mod_base = OTHER; note = 5-methylcytosine with phosphorothioate linkage
  modified_base 14: mod_base = OTHER; note = Nucleotide with phosphorothioate linkage
  modified_base 15: mod_base = OTHER; note = Nucleotide with phosphorothioate linkage
  modified_base 16: mod_base = OTHER; note = 2'-O-methoxyethyl modified nucleotide with phosphorothioate linkage
  modified_base 17: mod_base = OTHER; note = 2'-O-methoxyethyl modified nucleotide with phosphorothioate linkage
  modified_base 18: mod_base = OTHER; note = 2'-O-methoxyethyl modified thymine with phosphorothioate linkage
  modified_base 19: mod_base = OTHER; note = 2'-O-methoxyethyl modified nucleotide with phosphorothioate linkage
  modified_base 20: mod_base = OTHER; note = Tert-butylguanidine bridged 5-methylcytosine
  misc_feature 1..4: note = RNA
  misc_feature 5..9: note = DNA
  misc_feature 10: note = RNA
  misc_feature 11..15: note = DNA
  misc_feature 16..20: note = RNA
gcagaggtgnagcgaagtgc

SEQ ID NO: 742 - DNA, 20 bp, synthetic construct
  source 1..20: mol_type = other DNA
  modified_base 1: mod_base = OTHER; note = 2'-O-methoxyethyl modified nucleotide with phosphorothioate linkage
  modified_base 2: mod_base = OTHER; note = Tert-butylguanidine bridged 5-methylcytosine with phosphorothioate linkage
  modified_base 3: mod_base = OTHER; note = Tert-butylguanidine bridged nucleotide with phosphorothioate linkage
  modified_base 4: mod_base = OTHER; note = 2'-O-methoxyethyl modified nucleotide with phosphorothioate linkage
  modified_base 5: mod_base = OTHER; note = Nucleotide with phosphorothioate linkage
  modified_base 6: mod_base = OTHER; note = Nucleotide with phosphorothioate linkage
  modified_base 7: mod_base = OTHER; note = Nucleotide with phosphorothioate linkage
  modified_base 8: mod_base = OTHER; note = Thymine with phosphorothioate linkage
  modified_base 9: mod_base = OTHER; note = Nucleotide with phosphorothioate linkage
  modified_base 10: mod_base = OTHER; note = 2'-O-methyl modified abasic nucleotide with phosphorothioate linkage
  modified_base 11: mod_base = OTHER; note = Nucleotide with phosphorothioate linkage
  modified_base 12: mod_base = OTHER; note = Nucleotide with phosphorothioate linkage
  modified_base 13: mod_base = OTHER; note = 5-methylcytosine with phosphorothioate linkage
  modified_base 14: mod_base = OTHER; note = Nucleotide with phosphorothioate linkage
  modified_base 15: mod_base = OTHER; note = Nucleotide with phosphorothioate linkage
  modified_base 16: mod_base = OTHER; note = 2'-O-methoxyethyl modified nucleotide with phosphorothioate linkage
  modified_base 17: mod_base = OTHER; note = 2'-O-methoxyethyl modified nucleotide with phosphorothioate linkage
  modified_base 18: mod_base = OTHER; note = 2'-O-methoxyethyl modified thymine with phosphorothioate linkage
  modified_base 19: mod_base = OTHER; note = 2'-O-methoxyethyl modified nucleotide with phosphorothioate linkage
  modified_base 20: mod_base = OTHER; note = 2'-O-methoxyethyl 5-methylcytosine
  misc_feature 1..4: note = RNA
  misc_feature 5..9: note = DNA
  misc_feature 10: note = RNA
  misc_feature 11..15: note = DNA
  misc_feature 16..20: note = RNA
gcagaggtgnagcgaagtgc

SEQ ID NO: 743 - DNA, 20 bp, synthetic construct
  source 1..20: mol_type = other DNA
  modified_base 1: mod_base = OTHER; note = 2'-O-methoxyethyl modified nucleotide with phosphorothioate linkage
  modified_base 2: mod_base = OTHER; note = Tert-butylguanidine bridged 5-methylcytosine with phosphorothioate linkage
  modified_base 3: mod_base = OTHER; note = 2'-O-methoxyethyl modified nucleotide with phosphorothioate linkage
  modified_base 4: mod_base = OTHER; note = 2'-O-methoxyethyl modified nucleotide with phosphorothioate linkage
  modified_base 5: mod_base = OTHER; note = Nucleotide with phosphorothioate linkage
  modified_base 6: mod_base = OTHER; note = Nucleotide with phosphorothioate linkage
  modified_base 7: mod_base = OTHER; note = Nucleotide with phosphorothioate linkage
  modified_base 8: mod_base = OTHER; note = Thymine with phosphorothioate linkage
  modified_base 9: mod_base = OTHER; note = Nucleotide with phosphorothioate linkage
  modified_base 10: mod_base = OTHER; note = 2'-O-methyl modified abasic nucleotide with phosphorothioate linkage
  modified_base 11: mod_base = OTHER; note = Nucleotide with phosphorothioate linkage
  modified_base 12: mod_base = OTHER; note = Nucleotide with phosphorothioate linkage
  modified_base 13: mod_base = OTHER; note = 5-methylcytosine with phosphorothioate linkage
  modified_base 14: mod_base = OTHER; note = Nucleotide with phosphorothioate linkage
  modified_base 15: mod_base = OTHER; note = Nucleotide with phosphorothioate linkage
  modified_base 16: mod_base = OTHER; note = Tert-butylguanidine bridged nucleotide with phosphorothioate linkage
  modified_base 17: mod_base = OTHER; note = 2'-O-methoxyethyl modified nucleotide with phosphorothioate linkage
  modified_base 18: mod_base = OTHER; note = 2'-O-methoxyethyl modified thymine with phosphorothioate linkage
  modified_base 19: mod_base = OTHER; note = 2'-O-methoxyethyl modified nucleotide with phosphorothioate linkage
  modified_base 20: mod_base = OTHER; note = 2'-O-methoxyethyl 5-methylcytosine
  misc_feature 1..4: note = RNA
  misc_feature 5..9: note = DNA
  misc_feature 10: note = RNA
  misc_feature 11..15: note = DNA
  misc_feature 16..20: note = RNA
gcagaggtgnagcgaagtgc

SEQ ID NO: 744 - DNA, 20 bp, synthetic construct
  source 1..20: mol_type = other DNA
  modified_base 1: mod_base = OTHER; note = 2'-O-methoxyethyl modified nucleotide with phosphorothioate linkage
  modified_base 2: mod_base = OTHER; note = Tert-butylguanidine bridged 5-methylcytosine with phosphorothioate linkage
  modified_base 3: mod_base = OTHER; note = 2'-O-methoxyethyl modified nucleotide with phosphorothioate linkage
  modified_base 4: mod_base = OTHER; note = 2'-O-methoxyethyl modified nucleotide with phosphorothioate linkage
  modified_base 5: mod_base = OTHER; note = Nucleotide with phosphorothioate linkage
  modified_base 6: mod_base = OTHER; note = Nucleotide with phosphorothioate linkage
  modified_base 7: mod_base = OTHER; note = Nucleotide with phosphorothioate linkage
  modified_base 8: mod_base = OTHER; note = Thymine with phosphorothioate linkage
  modified_base 9: mod_base = OTHER; note = Nucleotide with phosphorothioate linkage
  modified_base 10: mod_base = OTHER; note = 2'-O-methyl modified abasic nucleotide with phosphorothioate linkage
  modified_base 11: mod_base = OTHER; note = Nucleotide with phosphorothioate linkage
  modified_base 12: mod_base = OTHER; note = Nucleotide with phosphorothioate linkage
  modified_base 13: mod_base = OTHER; note = 5-methylcytosine with phosphorothioate linkage
  modified_base 14: mod_base = OTHER; note = Nucleotide with phosphorothioate linkage
  modified_base 15: mod_base = OTHER; note = Nucleotide with phosphorothioate linkage
  modified_base 16: mod_base = OTHER; note = 2'-O-methoxyethyl modified nucleotide with phosphorothioate linkage
  modified_base 17: mod_base = OTHER; note = 2'-O-methoxyethyl modified nucleotide with phosphorothioate linkage
  modified_base 18: mod_base = OTHER; note = Tert-butylguanidine bridged thymine with phosphorothioate linkage
  modified_base 19: mod_base = OTHER; note = 2'-O-methoxyethyl modified nucleotide with phosphorothioate linkage
  modified_base 20: mod_base = OTHER; note = 2'-O-methoxyethyl 5-methylcytosine
  misc_feature 1..4: note = RNA
  misc_feature 5..9: note = DNA
  misc_feature 10: note = RNA
  misc_feature 11..15: note = DNA
  misc_feature 16..20: note = RNA
gcagaggtgnagcgaagtgc

SEQ ID NO: 745 - DNA, 20 bp, synthetic construct
  source 1..20: mol_type = other DNA
  modified_base 1: mod_base = OTHER; note = 2'-O-methoxyethyl modified nucleotide with phosphorothioate linkage
  modified_base 2: mod_base = OTHER; note = Tert-butylguanidine bridged 5-methylcytosine with phosphorothioate linkage
  modified_base 3: mod_base = OTHER; note = 2'-O-methoxyethyl modified nucleotide with phosphorothioate linkage
  modified_base 4: mod_base = OTHER; note = 2'-O-methoxyethyl modified nucleotide with phosphorothioate linkage
  modified_base 5: mod_base = OTHER; note = Nucleotide with phosphorothioate linkage
  modified_base 6: mod_base = OTHER; note = Nucleotide with phosphorothioate linkage
  modified_base 7: mod_base = OTHER; note = Nucleotide with phosphorothioate linkage
  modified_base 8: mod_base = OTHER; note = Thymine with phosphorothioate linkage
  modified_base 9: mod_base = OTHER; note = Nucleotide with phosphorothioate linkage
  modified_base 10: mod_base = OTHER; note = 2'-O-methyl modified abasic nucleotide with phosphorothioate linkage
  modified_base 11: mod_base = OTHER; note = Nucleotide with phosphorothioate linkage
  modified_base 12: mod_base = OTHER; note = Nucleotide with phosphorothioate linkage
  modified_base 13: mod_base = OTHER; note = 5-methylcytosine with phosphorothioate linkage
  modified_base 14: mod_base = OTHER; note = Nucleotide with phosphorothioate linkage
  modified_base 15: mod_base = OTHER; note = Nucleotide with phosphorothioate linkage
  modified_base 16: mod_base = OTHER; note = 2'-O-methoxyethyl modified nucleotide with phosphorothioate linkage
  modified_base 17: mod_base = OTHER; note = 2'-O-methoxyethyl modified nucleotide with phosphorothioate linkage
  modified_base 18: mod_base = OTHER; note = 2'-O-methoxyethyl modified thymine with phosphorothioate linkage
  modified_base 19: mod_base = OTHER; note = 2'-O-methoxyethyl modified nucleotide with phosphorothioate linkage
  modified_base 20: mod_base = OTHER; note = Tert-butylguanidine bridged 5-methylcytosine
  misc_feature 1..4: note = RNA
  misc_feature 5..9: note = DNA
  misc_feature 10: note = RNA
  misc_feature 11..15: note = DNA
  misc_feature 16..20: note = RNA
gcagaggtgnagcgaagtgc

SEQ ID NO: 746 - DNA, 20 bp, synthetic construct
  source 1..20: mol_type = other DNA
  modified_base 1: mod_base = OTHER; note = 2'-O-methoxyethyl modified nucleotide with phosphorothioate linkage
  modified_base 2: mod_base = OTHER; note = 2'-O-methoxyethyl 5-methylcytosine with phosphorothioate linkage
  modified_base 3: mod_base = OTHER; note = Tert-butylguanidine bridged nucleotide with phosphorothioate linkage
  modified_base 4: mod_base = OTHER; note = 2'-O-methoxyethyl modified nucleotide with phosphorothioate linkage
  modified_base 5: mod_base = OTHER; note = Nucleotide with phosphorothioate linkage
  modified_base 6: mod_base = OTHER; note = Nucleotide with phosphorothioate linkage
  modified_base 7: mod_base = OTHER; note = Nucleotide with phosphorothioate linkage
  modified_base 8: mod_base = OTHER; note = Thymine with phosphorothioate linkage
  modified_base 9: mod_base = OTHER; note = Nucleotide with phosphorothioate linkage
  modified_base 10: mod_base = OTHER; note = 2'-O-methyl modified abasic nucleotide with phosphorothioate linkage
  modified_base 11: mod_base = OTHER; note = Nucleotide with phosphorothioate linkage
  modified_base 12: mod_base = OTHER; note = Nucleotide with phosphorothioate linkage
  modified_base 13: mod_base = OTHER; note = 5-methylcytosine with phosphorothioate linkage
  modified_base 14: mod_base = OTHER; note = Nucleotide with phosphorothioate linkage
  modified_base 15: mod_base = OTHER; note = Nucleotide with phosphorothioate linkage
  modified_base 16: mod_base = OTHER; note = Tert-butylguanidine bridged nucleotide with phosphorothioate linkage
  modified_base 17: mod_base = OTHER; note = 2'-O-methoxyethyl modified nucleotide with phosphorothioate linkage
  modified_base 18: mod_base = OTHER; note = 2'-O-methoxyethyl modified thymine with phosphorothioate linkage
  modified_base 19: mod_base = OTHER; note = 2'-O-methoxyethyl modified nucleotide with phosphorothioate linkage
  modified_base 20: mod_base = OTHER; note = 2'-O-methoxyethyl 5-methylcytosine
  misc_feature 1..4: note = RNA
  misc_feature 5..9: note = DNA
  misc_feature 10: note = RNA
  misc_feature 11..15: note = DNA
  misc_feature 16..20: note = RNA
gcagaggtgnagcgaagtgc

SEQ ID NO: 747 - DNA, 20 bp, synthetic construct
  source 1..20: mol_type = other DNA
  modified_base 1: mod_base = OTHER; note = 2'-O-methoxyethyl modified nucleotide with phosphorothioate linkage
  modified_base 2: mod_base = OTHER; note = 2'-O-methoxyethyl 5-methylcytosine with phosphorothioate linkage
  modified_base 3: mod_base = OTHER; note = Tert-butylguanidine bridged nucleotide with phosphorothioate linkage
  modified_base 4: mod_base = OTHER; note = 2'-O-methoxyethyl modified nucleotide with phosphorothioate linkage
  modified_base 5: mod_base = OTHER; note = Nucleotide with phosphorothioate linkage
  modified_base 6: mod_base = OTHER; note = Nucleotide with phosphorothioate linkage
  modified_base 7: mod_base = OTHER; note = Nucleotide with phosphorothioate linkage
  modified_base 8: mod_base = OTHER; note = Thymine with phosphorothioate linkage
  modified_base 9: mod_base = OTHER; note = Nucleotide with phosphorothioate linkage
  modified_base 10: mod_base = OTHER; note = 2'-O-methyl modified abasic nucleotide with phosphorothioate linkage
  modified_base 11: mod_base = OTHER; note = Nucleotide with phosphorothioate linkage
  modified_base 12: mod_base = OTHER; note = Nucleotide with phosphorothioate linkage
  modified_base 13: mod_base = OTHER; note = 5-methylcytosine with phosphorothioate linkage
  modified_base 14: mod_base = OTHER; note = Nucleotide with phosphorothioate linkage
  modified_base 15: mod_base = OTHER; note = Nucleotide with phosphorothioate linkage
  modified_base 16: mod_base = OTHER; note = 2'-O-methoxyethyl modified nucleotide with phosphorothioate linkage
  modified_base 17: mod_base = OTHER; note = 2'-O-methoxyethyl modified nucleotide with phosphorothioate linkage
  modified_base 18: mod_base = OTHER; note = Tert-butylguanidine bridged thymine with phosphorothioate linkage
  modified_base 19: mod_base = OTHER; note = 2'-O-methoxyethyl modified nucleotide with phosphorothioate linkage
  modified_base 20: mod_base = OTHER; note = 2'-O-methoxyethyl 5-methylcytosine
  misc_feature 1..4: note = RNA
  misc_feature 5..9: note = DNA
  misc_feature 10: note = RNA
  misc_feature 11..15: note = DNA
  misc_feature 16..20: note = RNA
gcagaggtgnagcgaagtgc

SEQ ID NO: 748 - DNA, 20 bp, synthetic construct
  source 1..20: mol_type = other DNA
  modified_base 1: mod_base = OTHER; note = 2'-O-methoxyethyl modified nucleotide with phosphorothioate linkage
  modified_base 2: mod_base = OTHER; note = 2'-O-methoxyethyl 5-methylcytosine with phosphorothioate linkage
  modified_base 3: mod_base = OTHER; note = Tert-butylguanidine bridged nucleotide with phosphorothioate linkage
  modified_base 4: mod_base = OTHER; note = 2'-O-methoxyethyl modified nucleotide with phosphorothioate linkage
  modified_base 5: mod_base = OTHER; note = Nucleotide with phosphorothioate linkage
  modified_base 6: mod_base = OTHER; note = Nucleotide with phosphorothioate linkage
  modified_base 7: mod_base = OTHER; note = Nucleotide with phosphorothioate linkage
  modified_base 8: mod_base = OTHER; note = Thymine with phosphorothioate linkage
  modified_base 9: mod_base = OTHER; note = Nucleotide with phosphorothioate linkage
  modified_base 10: mod_base = OTHER; note = 2'-O-methyl modified abasic nucleotide with phosphorothioate linkage
  modified_base 11: mod_base = OTHER; note = Nucleotide with phosphorothioate linkage
  modified_base 12: mod_base = OTHER; note = Nucleotide with phosphorothioate linkage
  modified_base 13: mod_base = OTHER; note = 5-methylcytosine with phosphorothioate linkage
  modified_base 14: mod_base = OTHER; note = Nucleotide with phosphorothioate linkage
  modified_base 15: mod_base = OTHER; note = Nucleotide with phosphorothioate linkage
  modified_base 16: mod_base = OTHER; note = 2'-O-methoxyethyl modified nucleotide with phosphorothioate linkage
  modified_base 17: mod_base = OTHER; note = 2'-O-methoxyethyl modified nucleotide with phosphorothioate linkage
  modified_base 18: mod_base = OTHER; note = 2'-O-methoxyethyl modified thymine with phosphorothioate linkage
  modified_base 19: mod_base = OTHER; note = 2'-O-methoxyethyl modified nucleotide with phosphorothioate linkage
  modified_base 20: mod_base = OTHER; note = Tert-butylguanidine bridged 5-methylcytosine
  misc_feature 1..4: note = RNA
  misc_feature 5..9: note = DNA
  misc_feature 10: note = RNA
  misc_feature 11..15: note = DNA
  misc_feature 16..20: note = RNA
gcagaggtgnagcgaagtgc

SEQ ID NO: 749 - DNA, 20 bp, synthetic construct
  source 1..20: mol_type = other DNA
  modified_base 1: mod_base = OTHER; note = 2'-O-methoxyethyl modified nucleotide with phosphorothioate linkage
  modified_base 2: mod_base = OTHER; note = 2'-O-methoxyethyl 5-methylcytosine with phosphorothioate linkage
  modified_base 3: mod_base = OTHER; note = 2'-O-methoxyethyl modified nucleotide with phosphorothioate linkage
  modified_base 4: mod_base = OTHER; note = 2'-O-methoxyethyl modified nucleotide with phosphorothioate linkage
  modified_base 5: mod_base = OTHER; note = Nucleotide with phosphorothioate linkage
  modified_base 6: mod_base = OTHER; note = Nucleotide with phosphorothioate linkage
  modified_base 7: mod_base = OTHER; note = Nucleotide with phosphorothioate linkage
  modified_base 8: mod_base = OTHER; note = Thymine with phosphorothioate linkage
  modified_base 9: mod_base = OTHER; note = Nucleotide with phosphorothioate linkage
  modified_base 10: mod_base = OTHER; note = 2'-O-methyl modified abasic nucleotide with phosphorothioate linkage
  modified_base 11: mod_base = OTHER; note = Nucleotide with phosphorothioate linkage
  modified_base 12: mod_base = OTHER; note = Nucleotide with phosphorothioate linkage
  modified_base 13: mod_base = OTHER; note = 5-methylcytosine with phosphorothioate linkage
  modified_base 14: mod_base = OTHER; note = Nucleotide with phosphorothioate linkage
  modified_base 15: mod_base = OTHER; note = Nucleotide with phosphorothioate linkage
  modified_base 16: mod_base = OTHER; note = Tert-butylguanidine bridged nucleotide with phosphorothioate linkage
  modified_base 17: mod_base = OTHER; note = 2'-O-methoxyethyl modified nucleotide with phosphorothioate linkage
  modified_base 18: mod_base = OTHER; note = Tert-butylguanidine bridged thymine with phosphorothioate linkage
  modified_base 19: mod_base = OTHER; note = 2'-O-methoxyethyl modified nucleotide with phosphorothioate linkage
  modified_base 20: mod_base = OTHER; note = 2'-O-methoxyethyl 5-methylcytosine
  misc_feature 1..4: note = RNA
  misc_feature 5..9: note = DNA
  misc_feature 10: note = RNA
  misc_feature 11..15: note = DNA
  misc_feature 16..20: note = RNA
gcagaggtgnagcgaagtgc

SEQ ID NO: 750 - DNA, 20 bp, synthetic construct
  source 1..20: mol_type = other DNA
  modified_base 1: mod_base = OTHER; note = 2'-O-methoxyethyl modified nucleotide with phosphorothioate linkage
  modified_base 2: mod_base = OTHER; note = 2'-O-methoxyethyl 5-methylcytosine with phosphorothioate linkage
  modified_base 3: mod_base = OTHER; note = 2'-O-methoxyethyl modified nucleotide with phosphorothioate linkage
  modified_base 4: mod_base = OTHER; note = 2'-O-methoxyethyl modified nucleotide with phosphorothioate linkage
  modified_base 5: mod_base = OTHER; note = Nucleotide with phosphorothioate linkage
  modified_base 6: mod_base = OTHER; note = Nucleotide with phosphorothioate linkage
  modified_base 7: mod_base = OTHER; note = Nucleotide with phosphorothioate linkage
  modified_base 8: mod_base = OTHER; note = Thymine with phosphorothioate linkage
  modified_base 9: mod_base = OTHER; note = Nucleotide with phosphorothioate linkage
  modified_base 10: mod_base = OTHER; note = 2'-O-methyl modified abasic nucleotide with phosphorothioate linkage
  modified_base 11: mod_base = OTHER; note = Nucleotide with phosphorothioate linkage
  modified_base 12: mod_base = OTHER; note = Nucleotide with phosphorothioate linkage
  modified_base 13: mod_base = OTHER; note = 5-methylcytosine with phosphorothioate linkage
  modified_base 14: mod_base = OTHER; note = Nucleotide with phosphorothioate linkage
  modified_base 15: mod_base = OTHER; note = Nucleotide with phosphorothioate linkage
  modified_base 16: mod_base = OTHER; note = Tert-butylguanidine bridged nucleotide with phosphorothioate linkage
  modified_base 17: mod_base = OTHER; note = 2'-O-methoxyethyl modified nucleotide with phosphorothioate linkage
  modified_base 18: mod_base = OTHER; note = 2'-O-methoxyethyl modified thymine with phosphorothioate linkage
  modified_base 19: mod_base = OTHER; note = 2'-O-methoxyethyl modified nucleotide with phosphorothioate linkage
  modified_base 20: mod_base = OTHER; note = Tert-butylguanidine bridged 5-methylcytosine
  misc_feature 1..4: note = RNA
  misc_feature 5..9: note = DNA
  misc_feature 10: note = RNA
  misc_feature 11..15: note = DNA
  misc_feature 16..20: note = RNA
gcagaggtgnagcgaagtgc

SEQ ID NO: 751 - DNA, 20 bp, synthetic construct
  source 1..20: mol_type = other DNA
  modified_base 1: mod_base = OTHER; note = 2'-O-methoxyethyl modified nucleotide with phosphorothioate linkage
  modified_base 2: mod_base = OTHER; note = 2'-O-methoxyethyl 5-methylcytosine with phosphorothioate linkage
  modified_base 3: mod_base = OTHER; note = 2'-O-methoxyethyl modified nucleotide with phosphorothioate linkage
  modified_base 4: mod_base = OTHER; note = 2'-O-methoxyethyl modified nucleotide with phosphorothioate linkage
  modified_base 5: mod_base = OTHER; note = Nucleotide with phosphorothioate linkage
  modified_base 6: mod_base = OTHER; note = Nucleotide with phosphorothioate linkage
  modified_base 7: mod_base = OTHER; note = Nucleotide with phosphorothioate linkage
  modified_base 8: mod_base = OTHER; note = Thymine with phosphorothioate linkage
  modified_base 9: mod_base = OTHER; note = Nucleotide with phosphorothioate linkage
  modified_base 10: mod_base = OTHER; note = 2'-O-methyl modified abasic nucleotide with phosphorothioate linkage
  modified_base 11: mod_base = OTHER; note = Nucleotide with phosphorothioate linkage
  modified_base 12: mod_base = OTHER; note = Nucleotide with phosphorothioate linkage
  modified_base 13: mod_base = OTHER; note = 5-methylcytosine with phosphorothioate linkage
  modified_base 14: mod_base = OTHER; note = Nucleotide with phosphorothioate linkage
  modified_base 15: mod_base = OTHER; note = Nucleotide with phosphorothioate linkage
  modified_base 16: mod_base = OTHER; note = 2'-O-methoxyethyl modified nucleotide with phosphorothioate linkage
  modified_base 17: mod_base = OTHER; note = 2'-O-methoxyethyl modified nucleotide with phosphorothioate linkage
  modified_base 18: mod_base = OTHER; note = Tert-butylguanidine bridged thymine with phosphorothioate linkage
  modified_base 19: mod_base = OTHER; note = 2'-O-methoxyethyl modified nucleotide with phosphorothioate linkage
  modified_base 20: mod_base = OTHER; note = Tert-butylguanidine bridged 5-methylcytosine
  misc_feature 1..4: note = RNA
  misc_feature 5..9: note = DNA
  misc_feature 10: note = RNA
  misc_feature 11..15: note = DNA
  misc_feature 16..20: note = RNA
gcagaggtgnagcgaagtgc

SEQ ID NO: 752 - DNA, 21 bp, synthetic construct
  source 1..21: mol_type = other DNA
  modified_base 1: mod_base = OTHER; note = 2'-O-methoxyethyl modified thymine with phosphorothioate linkage
  modified_base 2: mod_base = OTHER; note = 2'-O-methoxyethyl modified nucleotide with phosphorothioate linkage
  modified_base 3: mod_base = OTHER; note = 2'-O-methoxyethyl 5-methylcytosine with phosphorothioate linkage
  modified_base 4: mod_base = OTHER; note = 2'-O-methoxyethyl modified nucleotide with phosphorothioate linkage
  modified_base 5: mod_base = OTHER; note = 2'-O-methoxyethyl modified nucleotide with phosphorothioate linkage
  modified_base 6: mod_base = OTHER; note = Nucleotide with phosphorothioate linkage
  modified_base 7: mod_base = OTHER; note = Nucleotide with phosphorothioate linkage
  modified_base 8: mod_base = OTHER; note = Nucleotide with phosphorothioate linkage
  modified_base 9: mod_base = OTHER; note = Thymine with phosphorothioate linkage
  modified_base 10: mod_base = OTHER; note = Nucleotide with phosphorothioate linkage
  modified_base 11: mod_base = OTHER; note = Nucleotide with phosphorothioate linkage
  modified_base 12: mod_base = OTHER; note = Nucleotide with phosphorothioate linkage
  modified_base 13: mod_base = OTHER; note = Nucleotide with phosphorothioate linkage
  modified_base 14: mod_base = OTHER; note = 5-methylcytosine with phosphorothioate linkage
  modified_base 15: mod_base = OTHER; note = Nucleotide with phosphorothioate linkage
  modified_base 16: mod_base = OTHER; note = 2'-O-methoxyethyl modified nucleotide with phosphorothioate linkage
  modified_base 17: mod_base = OTHER; note = 2'-O-methoxyethyl modified nucleotide with phosphorothioate linkage
  modified_base 18: mod_base = OTHER; note = 2'-O-methoxyethyl modified nucleotide with phosphorothioate linkage
  modified_base 19: mod_base = OTHER; note = 2'-O-methoxyethyl modified thymine with phosphorothioate linkage
  modified_base 20: mod_base = OTHER; note = 2'-O-methoxyethyl modified nucleotide with phosphorothioate linkage
  modified_base 21: mod_base = OTHER; note = 2'-O-methoxyethyl 5-methylcytosine
  misc_feature 1..5: note = RNA
  misc_feature 6..15: note = DNA
  misc_feature 16..21: note = RNA
tgcagaggtgaagcgaagtgc

SEQ ID NO: 753 - DNA, 21 bp, synthetic construct
  source 1..21: mol_type = other DNA
  modified_base 1: mod_base = OTHER; note = 2'-O-methoxyethyl modified thymine with phosphorothioate linkage
  modified_base 2: mod_base = OTHER; note = 2'-O-methoxyethyl modified nucleotide with phosphorothioate linkage
  modified_base 3: mod_base = OTHER; note = 2'-O-methoxyethyl 5-methylcytosine with phosphorothioate linkage
  modified_base 4: mod_base = OTHER; note = 2'-O-methoxyethyl modified nucleotide with phosphorothioate linkage
  modified_base 5: mod_base = OTHER; note = 2'-O-methoxyethyl modified nucleotide with phosphorothioate linkage
  modified_base 6: mod_base = OTHER; note = 2'-O-methoxyethyl modified nucleotide with phosphorothioate linkage
  modified_base 7: mod_base = OTHER; note = Nucleotide with phosphorothioate linkage
  modified_base 8: mod_base = OTHER; note = Nucleotide with phosphorothioate linkage
  modified_base 9: mod_base = OTHER; note = Thymine with phosphorothioate linkage
  modified_base 10: mod_base = OTHER; note = Nucleotide with phosphorothioate linkage
  modified_base 11: mod_base = OTHER; note = Nucleotide with phosphorothioate linkage
  modified_base 12: mod_base = OTHER; note = Nucleotide with phosphorothioate linkage
  modified_base 13: mod_base = OTHER; note = Nucleotide with phosphorothioate linkage
  modified_base 14: mod_base = OTHER; note = 5-methylcytosine with phosphorothioate linkage
  modified_base 15: mod_base = OTHER; note = Nucleotide with phosphorothioate linkage
  modified_base 16: mod_base = OTHER; note = Nucleotide with phosphorothioate linkage
  modified_base 17: mod_base = OTHER; note = 2'-O-methoxyethyl modified nucleotide with phosphorothioate linkage
  modified_base 18: mod_base = OTHER; note = 2'-O-methoxyethyl modified nucleotide with phosphorothioate linkage
  modified_base 19: mod_base = OTHER; note = 2'-O-methoxyethyl modified thymine with phosphorothioate linkage
  modified_base 20: mod_base = OTHER; note = 2'-O-methoxyethyl modified nucleotide with phosphorothioate linkage
  modified_base 21: mod_base = OTHER; note = 2'-O-methoxyethyl 5-methylcytosine
  misc_feature 1..6: note = RNA
  misc_feature 7..16: note = DNA
  misc_feature 17..21: note = RNA
tgcagaggtgaagcgaagtgc

SEQ ID NO: 754 - DNA, 21 bp, synthetic construct
  source 1..21: mol_type = other DNA
  modified_base 1: mod_base = OTHER; note = 2'-O-methoxyethyl modified nucleotide with phosphorothioate linkage
  modified_base 2: mod_base = OTHER; note = 2'-O-methoxyethyl modified thymine with phosphorothioate linkage
  modified_base 3: mod_base = OTHER; note = 2'-O-methoxyethyl modified nucleotide with phosphorothioate linkage
  modified_base 4: mod_base = OTHER; note = 2'-O-methoxyethyl 5-methylcytosine with phosphorothioate linkage
  modified_base 5: mod_base = OTHER; note = 2'-O-methoxyethyl modified nucleotide with phosphorothioate linkage
  modified_base 6: mod_base = OTHER; note = Nucleotide with phosphorothioate linkage
  modified_base 7: mod_base = OTHER; note = Nucleotide with phosphorothioate linkage
  modified_base 8: mod_base = OTHER; note = Nucleotide with phosphorothioate linkage
  modified_base 9: mod_base = OTHER; note = Nucleotide with phosphorothioate linkage
  modified_base 10: mod_base = OTHER; note = Thymine with phosphorothioate linkage
  modified_base 11: mod_base = OTHER; note = Nucleotide with phosphorothioate linkage
  modified_base 12: mod_base = OTHER; note = Nucleotide with phosphorothioate linkage
  modified_base 13: mod_base = OTHER; note = Nucleotide with phosphorothioate linkage
  modified_base 14: mod_base = OTHER; note = Nucleotide with phosphorothioate linkage
  modified_base 15: mod_base = OTHER; note = 5-methylcytosine with phosphorothioate linkage
  modified_base 16: mod_base = OTHER; note = 2'-O-methoxyethyl modified nucleotide with phosphorothioate linkage
  modified_base 17: mod_base = OTHER; note = 2'-O-methoxyethyl modified nucleotide with phosphorothioate linkage
  modified_base 18: mod_base = OTHER; note = 2'-O-methoxyethyl modified nucleotide with phosphorothioate linkage
  modified_base 19: mod_base = OTHER; note = 2'-O-methoxyethyl modified nucleotide with phosphorothioate linkage
  modified_base 20: mod_base = OTHER; note = 2'-O-methoxyethyl modified thymine with phosphorothioate linkage
  modified_base 21: mod_base = OTHER; note = 2'-O-methoxyethyl modified nucleotide
  misc_feature 1..5: note = RNA
  misc_feature 6..15: note = DNA
  misc_feature 16..21: note = RNA
gtgcagaggtgaagcgaagtg

SEQ ID NO: 755 - DNA, 21 bp, synthetic construct
  source 1..21: mol_type = other DNA
  modified_base 1: mod_base = OTHER; note = 2'-O-methoxyethyl modified nucleotide with phosphorothioate linkage
  modified_base 2: mod_base = OTHER; note = 2'-O-methoxyethyl modified thymine with phosphorothioate linkage
  modified_base 3: mod_base = OTHER; note = 2'-O-methoxyethyl modified nucleotide with phosphorothioate linkage
  modified_base 4: mod_base = OTHER; note = 2'-O-methoxyethyl 5-methylcytosine with phosphorothioate linkage
  modified_base 5: mod_base = OTHER; note = 2'-O-methoxyethyl modified nucleotide with phosphorothioate linkage
  modified_base 6: mod_base = OTHER; note = 2'-O-methoxyethyl modified nucleotide with phosphorothioate linkage
  modified_base 7: mod_base = OTHER; note = Nucleotide with phosphorothioate linkage
  modified_base 8: mod_base = OTHER; note = Nucleotide with phosphorothioate linkage
  modified_base 9: mod_base = OTHER; note = Nucleotide with phosphorothioate linkage
  modified_base 10: mod_base = OTHER; note = Thymine with phosphorothioate linkage
  modified_base 11: mod_base = OTHER; note = Nucleotide with phosphorothioate linkage
  modified_base 12: mod_base = OTHER; note = Nucleotide with phosphorothioate linkage
  modified_base 13: mod_base = OTHER; note = Nucleotide with phosphorothioate linkage
  modified_base 14: mod_base = OTHER; note = Nucleotide with phosphorothioate linkage
  modified_base 15: mod_base = OTHER; note = 5-methylcytosine with phosphorothioate linkage
  modified_base 16: mod_base = OTHER; note = Nucleotide with phosphorothioate linkage
  modified_base 17: mod_base = OTHER; note = 2'-O-methoxyethyl modified nucleotide with phosphorothioate linkage
  modified_base 18: mod_base = OTHER; note = 2'-O-methoxyethyl modified nucleotide with phosphorothioate linkage
  modified_base 19: mod_base = OTHER; note = 2'-O-methoxyethyl modified nucleotide with phosphorothioate linkage
  modified_base 20: mod_base = OTHER; note = 2'-O-methoxyethyl modified thymine with phosphorothioate linkage
  modified_base 21: mod_base = OTHER; note = 2'-O-methoxyethyl modified nucleotide
  misc_feature 1..6: note = RNA
  misc_feature 7..16: note = DNA
  misc_feature 17..21: note = RNA
gtgcagaggtgaagcgaagtg

SEQ ID NO: 756 - DNA, 21 bp, synthetic construct
  source 1..21: mol_type = other DNA
  modified_base 1: mod_base = OTHER; note = 2'-O-methoxyethyl 5-methylcytosine with phosphorothioate linkage
  modified_base 2: mod_base = OTHER; note = 2'-O-methoxyethyl modified nucleotide with phosphorothioate linkage
  modified_base 3: mod_base = OTHER; note = 2'-O-methoxyethyl modified thymine with phosphorothioate linkage
  modified_base 4: mod_base = OTHER; note = 2'-O-methoxyethyl modified nucleotide with phosphorothioate linkage
  modified_base 5: mod_base = OTHER; note = 2'-O-methoxyethyl 5-methylcytosine with phosphorothioate linkage
  modified_base 6: mod_base = OTHER; note = Nucleotide with phosphorothioate linkage
  modified_base 7: mod_base = OTHER; note = Nucleotide with phosphorothioate linkage
  modified_base 8: mod_base = OTHER; note = Nucleotide with phosphorothioate linkage
  modified_base 9: mod_base = OTHER; note = Nucleotide with phosphorothioate linkage
  modified_base 10: mod_base = OTHER; note = Nucleotide with phosphorothioate linkage
  modified_base 11: mod_base = OTHER; note = Thymine with phosphorothioate linkage
  modified_base 12: mod_base = OTHER; note = Nucleotide with phosphorothioate linkage
  modified_base 13: mod_base = OTHER; note = Nucleotide with phosphorothioate linkage
  modified_base 14: mod_base = OTHER; note = Nucleotide with phosphorothioate linkage
  modified_base 15: mod_base = OTHER; note = Nucleotide with phosphorothioate linkage
  modified_base 16: mod_base = OTHER; note = 2'-O-methoxyethyl 5-methylcytosine with phosphorothioate linkage
  modified_base 17: mod_base = OTHER; note = 2'-O-methoxyethyl modified nucleotide with phosphorothioate linkage
  modified_base 18: mod_base = OTHER; note = 2'-O-methoxyethyl modified nucleotide with phosphorothioate linkage
  modified_base 19: mod_base = OTHER; note = 2'-O-methoxyethyl modified nucleotide with phosphorothioate linkage
  modified_base 20: mod_base = OTHER; note = 2'-O-methoxyethyl modified nucleotide with phosphorothioate linkage
  modified_base 21: mod_base = OTHER; note = 2'-O-methoxyethyl thymine
  misc_feature 1..5: note = RNA
  misc_feature 6..15: note = DNA
  misc_feature 16..21: note = RNA
cgtgcagaggtgaagcgaagt

SEQ ID NO: 757 - DNA, 21 bp, synthetic construct
  source 1..21: mol_type = other DNA
  modified_base 1: mod_base = OTHER; note = 2'-O-methoxyethyl 5-methylcytosine with phosphorothioate linkage
  modified_base 2: mod_base = OTHER; note = 2'-O-methoxyethyl modified nucleotide with phosphorothioate linkage
  modified_base 3: mod_base = OTHER; note = 2'-O-methoxyethyl modified thymine with phosphorothioate linkage
  modified_base 4: mod_base = OTHER; note = 2'-O-methoxyethyl modified nucleotide with phosphorothioate linkage
  modified_base 5: mod_base = OTHER; note = 2'-O-methoxyethyl 5-methylcytosine with phosphorothioate linkage
  modified_base 6: mod_base = OTHER; note = 2'-O-methoxyethyl modified nucleotide with phosphorothioate linkage
  modified_base 7: mod_base = OTHER; note = Nucleotide with phosphorothioate linkage
  modified_base 8: mod_base = OTHER; note = Nucleotide with phosphorothioate linkage
  modified_base 9: mod_base = OTHER; note = Nucleotide with phosphorothioate linkage
  modified_base 10: mod_base = OTHER; note = Nucleotide with phosphorothioate linkage
  modified_base 11: mod_base = OTHER; note = Thymine with phosphorothioate linkage
  modified_base 12: mod_base = OTHER; note = Nucleotide with phosphorothioate linkage
  modified_base 13: mod_base = OTHER; note = Nucleotide with phosphorothioate linkage
  modified_base 14: mod_base = OTHER; note = Nucleotide with phosphorothioate linkage
  modified_base 15: mod_base = OTHER; note = Nucleotide with phosphorothioate linkage
  modified_base 16: mod_base = OTHER; note = 5-methylcytosine with phosphorothioate linkage
  modified_base 17: mod_base = OTHER; note = 2'-O-methoxyethyl modified nucleotide with phosphorothioate linkage
  modified_base 18: mod_base = OTHER; note = 2'-O-methoxyethyl modified nucleotide with phosphorothioate linkage
  modified_base 19: mod_base = OTHER; note = 2'-O-methoxyethyl modified nucleotide with phosphorothioate linkage
  modified_base 20: mod_base = OTHER; note = 2'-O-methoxyethyl modified nucleotide with phosphorothioate linkage
  modified_base 21: mod_base = OTHER; note = 2'-O-methoxyethyl thymine
  misc_feature 1..6: note = RNA
  misc_feature 7..16: note = DNA
  misc_feature 17..21: note = RNA
cgtgcagaggtgaagcgaagt

SEQ ID NO: 758 - DNA, 20 bp, synthetic construct
  source 1..20: mol_type = other DNA
  modified_base 1: mod_base = OTHER; note = 2'-O-methoxyethyl 5-methylcytosine with phosphorothioate linkage
  modified_base 2: mod_base = OTHER; note = Locked nucleic acid with phosphorothioate linkage
  modified_base 3: mod_base = OTHER; note = 2'-O-methoxyethyl modified nucleotide with phosphorothioate linkage
  modified_base 4: mod_base = OTHER; note = 2'-O-methoxyethyl modified nucleotide with phosphorothioate linkage
  modified_base 5: mod_base = OTHER; note = 2'-O-methoxyethyl modified nucleotide with phosphorothioate linkage
  modified_base 6: mod_base = OTHER; note = Nucleotide with phosphorothioate linkage
  modified_base 7: mod_base = OTHER; note = Thymine with phosphorothioate linkage
  modified_base 8: mod_base = OTHER; note = Nucleotide with phosphorothioate linkage
  modified_base 9: mod_base = OTHER; note = Nucleotide with phosphorothioate linkage
  modified_base 10: mod_base = OTHER; note = Nucleotide with phosphorothioate linkage
  modified_base 11: mod_base = OTHER; note = Nucleotide with phosphorothioate linkage
  modified_base 12: mod_base = OTHER; note = 5-methylcytosine with phosphorothioate linkage
  modified_base 13: mod_base = OTHER; note = Nucleotide with phosphorothioate linkage
  modified_base 14: mod_base = OTHER; note = Nucleotide with phosphorothioate linkage
  modified_base 15: mod_base = OTHER; note = Nucleotide with phosphorothioate linkage
  modified_base 16: mod_base = OTHER; note = 2'-O-methyl modified nucleotide with phosphorothioate linkage
  modified_base 17: mod_base = OTHER; note = 2'-O-methoxyethyl modified thymine with phosphorothioate linkage
  modified_base 18: mod_base = OTHER; note = Locked nucleic acid with phosphorothioate linkage
  modified_base 19: mod_base = OTHER; note = 2'-O-methoxyethyl 5-methylcytosine with phosphorothioate linkage
  modified_base 20: mod_base = OTHER; note = 2'-O-methyl modified nucleotide
  misc_feature 1..5: note = RNA
  misc_feature 6..15: note = DNA
  misc_feature 16..20: note = RNA
cagaggtgaagcgaagtgca

SEQ ID NO: 759 - DNA, 20 bp, synthetic construct
  source 1..20: mol_type = other DNA
  modified_base 1: mod_base = OTHER; note = 2'-O-methoxyethyl 5-methylcytosine with phosphorothioate linkage
  modified_base 2: mod_base = OTHER; note = Locked nucleic acid with phosphorothioate linkage
  modified_base 3: mod_base = OTHER; note = 2'-O-methoxyethyl modified nucleotide with phosphorothioate linkage
  modified_base 4: mod_base = OTHER; note = 2'-O-methoxyethyl modified nucleotide with phosphorothioate linkage
  modified_base 5: mod_base = OTHER; note = 2'-O-methoxyethyl modified nucleotide with phosphorothioate linkage
  modified_base 6: mod_base = OTHER; note = Nucleotide with phosphorothioate linkage
  modified_base 7: mod_base = OTHER; note = Thymine with phosphorothioate linkage
  modified_base 8: mod_base = OTHER; note = Nucleotide with phosphorothioate linkage
  modified_base 9: mod_base = OTHER; note = Nucleotide with phosphorothioate linkage
  modified_base 10: mod_base = OTHER; note = Nucleotide with phosphorothioate linkage
  modified_base 11: mod_base = OTHER; note = Nucleotide with phosphorothioate linkage
  modified_base 12: mod_base = OTHER; note = 5-methylcytosine with phosphorothioate linkage
  modified_base 13: mod_base = OTHER; note = Nucleotide with phosphorothioate linkage
  modified_base 14: mod_base = OTHER; note = Nucleotide with phosphorothioate linkage
  modified_base 15: mod_base = OTHER; note = Nucleotide with phosphorothioate linkage
  modified_base 16: mod_base = OTHER; note = 2'-O-methoxyethyl modified nucleotide with phosphorothioate linkage
  modified_base 17: mod_base = OTHER; note = 2'-O-methoxyethyl modified thymine with phosphorothioate linkage
  modified_base 18: mod_base = OTHER; note = Locked nucleic acid with phosphorothioate linkage
  modified_base 19: mod_base = OTHER; note = 2'-O-methyl 5-methylcytosine with phosphorothioate linkage
  modified_base 20: mod_base = OTHER; note = 2'-O-methyl modified nucleotide
  misc_feature 1..5: note = RNA
  misc_feature 6..15: note = DNA
  misc_feature 16..20: note = RNA
cagaggtgaagcgaagtgca

SEQ ID NO: 760 - DNA, 20 bp, synthetic construct
  source 1..20: mol_type = other DNA
  modified_base 1: mod_base = OTHER; note = 2'-O-methoxyethyl 5-methylcytosine with phosphorothioate linkage
  modified_base 2: mod_base = OTHER; note = Locked nucleic acid with phosphorothioate linkage
  modified_base 3: mod_base = OTHER; note = 2'-O-methoxyethyl modified nucleotide with phosphorothioate linkage
  modified_base 4: mod_base = OTHER; note = 2'-O-methoxyethyl modified nucleotide with phosphorothioate linkage
  modified_base 5: mod_base = OTHER; note = 2'-O-methoxyethyl modified nucleotide with phosphorothioate linkage
  modified_base 6: mod_base = OTHER; note = Nucleotide with phosphorothioate linkage
  modified_base 7: mod_base = OTHER; note = Thymine with phosphorothioate linkage
  modified_base 8: mod_base = OTHER; note = Nucleotide with phosphorothioate linkage
  modified_base 9: mod_base = OTHER; note = Nucleotide with phosphorothioate linkage
  modified_base 10: mod_base = OTHER; note = Nucleotide with phosphorothioate linkage
  modified_base 11: mod_base = OTHER; note = Nucleotide with phosphorothioate linkage
  modified_base 12: mod_base = OTHER; note = 5-methylcytosine with phosphorothioate linkage
  modified_base 13: mod_base = OTHER; note = Nucleotide with phosphorothioate linkage
  modified_base 14: mod_base = OTHER; note = Nucleotide with phosphorothioate linkage
  modified_base 15: mod_base = OTHER; note = Nucleotide with phosphorothioate linkage
  modified_base 16: mod_base = OTHER; note = 2'-O-methyl modified nucleotide with phosphorothioate linkage
  modified_base 17: mod_base = OTHER; note = Locked thymine with phosphorothioate linkage
  modified_base 18: mod_base = OTHER; note = 2'-O-methyl modified nucleotide with phosphorothioate linkage
  modified_base 19: mod_base = OTHER; note = 2'-O-methoxyethyl 5-methylcytosine with phosphorothioate linkage
  modified_base 20: mod_base = OTHER; note = 2'-O-methoxyethyl modified nucleotide
  misc_feature 1..5: note = RNA
  misc_feature 6..15: note = DNA
  misc_feature 16..20: note = RNA
cagaggtgaagcgaagtgca

SEQ ID NO: 761 - DNA, 20 bp, synthetic construct
  source 1..20: mol_type = other DNA
  modified_base 1: mod_base = OTHER; note = 2'-O-methoxyethyl 5-methylcytosine with phosphorothioate linkage
  modified_base 2: mod_base = OTHER; note = Locked nucleic acid with phosphorothioate linkage
  modified_base 3: mod_base = OTHER; note = 2'-O-methoxyethyl modified nucleotide with phosphorothioate linkage
  modified_base 4: mod_base = OTHER; note = 2'-O-methoxyethyl modified nucleotide with phosphorothioate linkage
  modified_base 5: mod_base = OTHER; note = 2'-O-methoxyethyl modified nucleotide with phosphorothioate linkage
  modified_base 6: mod_base = OTHER; note = Nucleotide with phosphorothioate linkage
  modified_base 7: mod_base = OTHER; note = Thymine with phosphorothioate linkage
  modified_base 8: mod_base = OTHER; note = Nucleotide with phosphorothioate linkage
  modified_base 9: mod_base = OTHER; note = Nucleotide with phosphorothioate linkage
  modified_base 10: mod_base = OTHER; note = Nucleotide with phosphorothioate linkage
  modified_base 11: mod_base = OTHER; note = Nucleotide with phosphorothioate linkage
  modified_base 12: mod_base = OTHER; note = 5-methylcytosine with phosphorothioate linkage
  modified_base 13: mod_base = OTHER; note = Nucleotide with phosphorothioate linkage
  modified_base 14: mod_base = OTHER; note = Nucleotide with phosphorothioate linkage
  modified_base 15: mod_base = OTHER; note = Nucleotide with phosphorothioate linkage
  modified_base 16: mod_base = OTHER; note = 2'-O-methoxyethyl modified nucleotide with phosphorothioate linkage
  modified_base 17: mod_base = OTHER; note = Locked thymine with phosphorothioate linkage
  modified_base 18: mod_base = OTHER; note = 2'-O-methyl modified nucleotide with phosphorothioate linkage
  modified_base 19: mod_base = OTHER; note = 2'-O-methyl 5-methylcytosine with phosphorothioate linkage
  modified_base 20: mod_base = OTHER; note = 2'-O-methoxyethyl modified nucleotide
  misc_feature 1..5: note = RNA
  misc_feature 6..15: note = DNA
  misc_feature 16..20: note = RNA
cagaggtgaagcgaagtgca

SEQ ID NO: 762 - DNA, 20 bp, synthetic construct
  source 1..20: mol_type = other DNA
  modified_base 1: mod_base = OTHER; note = 2'-O-methoxyethyl 5-methylcytosine with phosphorothioate linkage
  modified_base 2: mod_base = OTHER; note = 2'-O-methoxyethyl modified nucleotide with phosphorothioate linkage
  modified_base 3: mod_base = OTHER; note = Locked nucleic acid with phosphorothioate linkage
  modified_base 4: mod_base = OTHER; note = 2'-O-methoxyethyl modified nucleotide with phosphorothioate linkage
  modified_base 5: mod_base = OTHER; note = 2'-O-methoxyethyl modified nucleotide with phosphorothioate linkage
  modified_base 6: mod_base = OTHER; note = Nucleotide with phosphorothioate linkage
  modified_base 7: mod_base = OTHER; note = Thymine with phosphorothioate linkage
  modified_base 8: mod_base = OTHER; note = Nucleotide with phosphorothioate linkage
  modified_base 9: mod_base = OTHER; note = Nucleotide with phosphorothioate linkage
  modified_base 10: mod_base = OTHER; note = Nucleotide with phosphorothioate linkage
  modified_base 11: mod_base = OTHER; note = Nucleotide with phosphorothioate linkage
  modified_base 12: mod_base = OTHER; note = 5-methylcytosine with phosphorothioate linkage
  modified_base 13: mod_base = OTHER; note = Nucleotide with phosphorothioate linkage
  modified_base 14: mod_base = OTHER; note = Nucleotide with phosphorothioate linkage
  modified_base 15: mod_base = OTHER; note = Nucleotide with phosphorothioate linkage
  modified_base 16: mod_base = OTHER; note = 2'-O-methyl modified nucleotide with phosphorothioate linkage
  modified_base 17: mod_base = OTHER; note = 2'-O-methoxyethyl modified thymine with phosphorothioate linkage
  modified_base 18: mod_base = OTHER; note = 2'-O-methyl modified nucleotide with phosphorothioate linkage
  modified_base 19: mod_base = OTHER; note = Locked 5-methylcytosine with phosphorothioate linkage
  modified_base 20: mod_base = OTHER; note = 2'-O-methoxyethyl modified nucleotide
  misc_feature 1..5: note = RNA
  misc_feature 6..15: note = DNA
  misc_feature 16..20: note = RNA
cagaggtgaagcgaagtgca

SEQ ID NO: 763 - DNA, 20 bp, synthetic construct
  source 1..20: mol_type = other DNA
  modified_base 1: mod_base = OTHER; note = 2'-O-methoxyethyl 5-methylcytosine with phosphorothioate linkage
  modified_base 2: mod_base = OTHER; note = 2'-O-methoxyethyl modified nucleotide with phosphorothioate linkage
  modified_base 3: mod_base = OTHER; note = Locked nucleic acid with phosphorothioate linkage
  modified_base 4: mod_base = OTHER; note = 2'-O-methoxyethyl modified nucleotide with phosphorothioate linkage
  modified_base 5: mod_base = OTHER; note = 2'-O-methoxyethyl modified nucleotide with phosphorothioate linkage
  modified_base 6: mod_base = OTHER; note = Nucleotide with phosphorothioate linkage
  modified_base 7: mod_base = OTHER; note = Thymine with phosphorothioate linkage
  modified_base 8: mod_base = OTHER; note = Nucleotide with phosphorothioate linkage
  modified_base 9: mod_base = OTHER; note = Nucleotide with phosphorothioate linkage
  modified_base 10: mod_base = OTHER; note = Nucleotide with phosphorothioate linkage
  modified_base 11: mod_base = OTHER; note = Nucleotide with phosphorothioate linkage
  modified_base 12: mod_base = OTHER; note = 5-methylcytosine with phosphorothioate linkage
  modified_base 13: mod_base = OTHER; note = Nucleotide with phosphorothioate linkage
  modified_base 14: mod_base = OTHER; note = Nucleotide with phosphorothioate linkage
  modified_base 15: mod_base = OTHER; note = Nucleotide with phosphorothioate linkage
  modified_base 16: mod_base = OTHER; note = 2'-O-methoxyethyl modified nucleotide with phosphorothioate linkage
  modified_base 17: mod_base = OTHER; note = 2'-O-methoxyethyl modified thymine with phosphorothioate linkage
  modified_base 18: mod_base = OTHER; note = 2'-O-methyl modified nucleotide with phosphorothioate linkage
  modified_base 19: mod_base = OTHER; note = Locked 5-methylcytosine with phosphorothioate linkage
  modified_base 20: mod_base = OTHER; note = 2'-O-methyl modified nucleotide
  misc_feature 1..5: note = RNA
  misc_feature 6..15: note = DNA
  misc_feature 16..20: note = RNA
cagaggtgaagcgaagtgca

SEQ ID NO: 764 - DNA, 20 bp, synthetic construct
  source 1..20: mol_type = other DNA
  modified_base 1: mod_base = OTHER; note = 2'-O-methoxyethyl modified nucleotide with phosphorothioate linkage
  modified_base 2: mod_base = OTHER; note = 2'-O-methoxyethyl 5-methylcytosine with phosphorothioate linkage
  modified_base 3: mod_base = OTHER; note = 2'-O-methoxyethyl modified nucleotide with phosphorothioate linkage
  modified_base 4: mod_base = OTHER; note = 2'-O-methoxyethyl modified nucleotide with phosphorothioate linkage
  modified_base 5: mod_base = OTHER; note = 2'-O-methoxyethyl modified nucleotide with phosphorothioate linkage
  modified_base 6: mod_base = OTHER; note = Nucleotide with phosphorothioate linkage
  modified_base 7: mod_base = OTHER; note = Nucleotide with phosphorothioate linkage
  modified_base 8: mod_base = OTHER; note = Thymine with phosphorothioate linkage
  modified_base 9: mod_base = OTHER; note = Nucleotide with phosphorothioate linkage
  modified_base 10: mod_base = OTHER; note = Nucleotide with phosphorothioate linkage
  modified_base 11: mod_base = OTHER; note = Nucleotide with phosphorothioate linkage
  modified_base 12: mod_base = OTHER; note = Nucleotide with phosphorothioate linkage
  modified_base 13: mod_base = OTHER; note = 5-methylcytosine with phosphorothioate linkage
  modified_base 14: mod_base = OTHER; note = Nucleotide with phosphorothioate linkage
  modified_base 15: mod_base = OTHER; note = Nucleotide with phosphorothioate linkage
  modified_base 16: mod_base = OTHER; note = 2'-O-methoxyethyl modified nucleotide with phosphorothioate linkage
  modified_base 17: mod_base = OTHER; note = 2'-O-methoxyethyl modified nucleotide with phosphorothioate linkage
  modified_base 18: mod_base = OTHER; note = 2'-O-methoxyethyl modified thymine with phosphorothioate linkage
  modified_base 19: mod_base = OTHER; note = 2'-O-methoxyethyl modified nucleotide with phosphorothioate linkage
  modified_base 20: mod_base = OTHER; note = 2'-O-methoxyethyl 5-methylcytosine
  misc_feature 1..5: note = RNA
  misc_feature 6..15: note = DNA
  misc_feature 16..20: note = RNA
gcagaagtgaagcgaagtgc

SEQ ID NO: 765 - DNA, 20 bp, synthetic construct
  source 1..20: mol_type = other DNA
  modified_base 1: mod_base = OTHER; note = 2'-O-methoxyethyl modified nucleotide with phosphorothioate linkage
  modified_base 2: mod_base = OTHER; note = 2'-O-methoxyethyl 5-methylcytosine with phosphorothioate linkage
  modified_base 3: mod_base = OTHER; note = 2'-O-methoxyethyl modified nucleotide with phosphorothioate linkage
  modified_base 4: mod_base = OTHER; note = 2'-O-methoxyethyl modified nucleotide with phosphorothioate linkage
  modified_base 5: mod_base = OTHER; note = 2'-O-methoxyethyl modified nucleotide with phosphorothioate linkage
  modified_base 6: mod_base = OTHER; note = 5-methylcytosine with phosphorothioate linkage
  modified_base 7: mod_base = OTHER; note = Nucleotide with phosphorothioate linkage
  modified_base 8: mod_base = OTHER; note = Thymine with phosphorothioate linkage
  modified_base 9: mod_base = OTHER; note = Nucleotide with phosphorothioate linkage
  modified_base 10: mod_base = OTHER; note = Nucleotide with phosphorothioate linkage
  modified_base 11: mod_base = OTHER; note = Nucleotide with phosphorothioate linkage
  modified_base 12: mod_base = OTHER; note = Nucleotide with phosphorothioate linkage
  modified_base 13: mod_base = OTHER; note = 5-methylcytosine with phosphorothioate linkage
  modified_base 14: mod_base = OTHER; note = Nucleotide with phosphorothioate linkage
  modified_base 15: mod_base = OTHER; note = Nucleotide with phosphorothioate linkage
  modified_base 16: mod_base = OTHER; note = 2'-O-methoxyethyl modified nucleotide with phosphorothioate linkage
  modified_base 17: mod_base = OTHER; note = 2'-O-methoxyethyl modified nucleotide with phosphorothioate linkage
  modified_base 18: mod_base = OTHER; note = 2'-O-methoxyethyl modified thymine with phosphorothioate linkage
  modified_base 19: mod_base = OTHER; note = 2'-O-methoxyethyl modified nucleotide with phosphorothioate linkage
  modified_base 20: mod_base = OTHER; note = 2'-O-methoxyethyl 5-methylcytosine
  misc_feature 1..5: note = RNA
  misc_feature 6..15: note = DNA
  misc_feature 16..20: note = RNA
gcagacgtgaagcgaagtgc

SEQ ID NO: 766 - DNA, 20 bp, synthetic construct
  source 1..20: mol_type = other DNA
  modified_base 1: mod_base = OTHER; note = 2'-O-methoxyethyl modified nucleotide with phosphorothioate linkage
  modified_base 2: mod_base = OTHER; note = 2'-O-methoxyethyl 5-methylcytosine with phosphorothioate linkage
  modified_base 3: mod_base = OTHER; note = 2'-O-methoxyethyl modified nucleotide with phosphorothioate linkage
  modified_base 4: mod_base = OTHER; note = 2'-O-methoxyethyl modified nucleotide with phosphorothioate linkage
  modified_base 5: mod_base = OTHER; note = 2'-O-methoxyethyl modified nucleotide with phosphorothioate linkage
  modified_base 6: mod_base = OTHER; note = Thymine with phosphorothioate linkage
  modified_base 7: mod_base = OTHER; note = Nucleotide with phosphorothioate linkage
  modified_base 8: mod_base = OTHER; note = Thymine with phosphorothioate linkage
  modified_base 9: mod_base = OTHER; note = Nucleotide with phosphorothioate linkage
  modified_base 10: mod_base = OTHER; note = Nucleotide with phosphorothioate linkage
  modified_base 11: mod_base = OTHER; note = Nucleotide with phosphorothioate linkage
  modified_base 12: mod_base = OTHER; note = Nucleotide with phosphorothioate linkage
  modified_base 13: mod_base = OTHER; note = 5-methylcytosine with phosphorothioate linkage
  modified_base 14: mod_base = OTHER; note = Nucleotide with phosphorothioate linkage
  modified_base 15: mod_base = OTHER; note = Nucleotide with phosphorothioate linkage
  modified_base 16: mod_base = OTHER; note = 2'-O-methoxyethyl modified nucleotide with phosphorothioate linkage
  modified_base 17: mod_base = OTHER; note = 2'-O-methoxyethyl modified nucleotide with phosphorothioate linkage
  modified_base 18: mod_base = OTHER; note = 2'-O-methoxyethyl modified thymine with phosphorothioate linkage
  modified_base 19: mod_base = OTHER; note = 2'-O-methoxyethyl modified nucleotide with phosphorothioate linkage
  modified_base 20: mod_base = OTHER; note = 2'-O-methoxyethyl 5-methylcytosine
  misc_feature 1..5: note = RNA
  misc_feature 6..15: note = DNA
  misc_feature 16..20: note = RNA
gcagatgtgaagcgaagtgc

SEQ ID NO: 767 - DNA, 20 bp, synthetic construct
  source 1..20: mol_type = other DNA
  modified_base 1: mod_base = OTHER; note = 2'-O-methoxyethyl modified nucleotide with phosphorothioate linkage
  modified_base 2: mod_base = OTHER; note = 2'-O-methoxyethyl 5-methylcytosine with phosphorothioate linkage
  modified_base 3: mod_base = OTHER; note = 2'-O-methoxyethyl modified nucleotide with phosphorothioate linkage
  modified_base 4: mod_base = OTHER; note = 2'-O-methoxyethyl modified nucleotide with phosphorothioate linkage
  modified_base 5: mod_base = OTHER; note = 2'-O-methoxyethyl modified nucleotide with phosphorothioate linkage
  modified_base 6: mod_base = OTHER; note = Nucleotide with phosphorothioate linkage
  modified_base 7: mod_base = OTHER; note = Nucleotide with phosphorothioate linkage
  modified_base 8: mod_base = OTHER; note = Thymine with phosphorothioate linkage
  modified_base 9: mod_base = OTHER; note = Nucleotide with phosphorothioate linkage
  modified_base 10: mod_base = OTHER; note = Nucleotide with phosphorothioate linkage
  modified_base 11: mod_base = OTHER; note = Nucleotide with phosphorothioate linkage
  modified_base 12: mod_base = OTHER; note = Nucleotide with phosphorothioate linkage
  modified_base 13: mod_base = OTHER; note = 5-methylcytosine with phosphorothioate linkage
  modified_base 14: mod_base = OTHER; note = Nucleotide with phosphorothioate linkage
  modified_base 15: mod_base = OTHER; note = Nucleotide with phosphorothioate linkage
  modified_base 16: mod_base = OTHER; note = 2'-O-methoxyethyl modified nucleotide with phosphorothioate linkage
  modified_base 17: mod_base = OTHER; note = 2'-O-methoxyethyl modified nucleotide with phosphorothioate linkage
  modified_base 18: mod_base = OTHER; note = 2'-O-methoxyethyl modified thymine with phosphorothioate linkage
  modified_base 19: mod_base = OTHER; note = 2'-O-methoxyethyl modified nucleotide with phosphorothioate linkage
  modified_base 20: mod_base = OTHER; note = 2'-O-methoxyethyl 5-methylcytosine
  misc_feature 1..5: note = RNA
  misc_feature 6..15: note = DNA
  misc_feature 16..20: note = RNA
gcagagatgaagcgaagtgc

SEQ ID NO: 768 - DNA, 20 bp, synthetic construct
  source 1..20: mol_type = other DNA
  modified_base 1: mod_base = OTHER; note = 2'-O-methoxyethyl modified nucleotide with phosphorothioate linkage
  modified_base 2: mod_base = OTHER; note = 2'-O-methoxyethyl 5-methylcytosine with phosphorothioate linkage
  modified_base 3: mod_base = OTHER; note = 2'-O-methoxyethyl modified nucleotide with phosphorothioate linkage
  modified_base 4: mod_base = OTHER; note = 2'-O-methoxyethyl modified nucleotide with phosphorothioate linkage
  modified_base 5: mod_base = OTHER; note = 2'-O-methoxyethyl modified nucleotide with phosphorothioate linkage
  modified_base 6: mod_base = OTHER; note = Nucleotide with phosphorothioate linkage
  modified_base 7: mod_base = OTHER; note = 5-methylcytosine with phosphorothioate linkage
  modified_base 8: mod_base = OTHER; note = Thymine with phosphorothioate linkage
  modified_base 9: mod_base = OTHER; note = Nucleotide with phosphorothioate linkage
  modified_base 10: mod_base = OTHER; note = Nucleotide with phosphorothioate linkage
  modified_base 11: mod_base = OTHER; note = Nucleotide with phosphorothioate linkage
  modified_base 12: mod_base = OTHER; note = Nucleotide with phosphorothioate linkage
  modified_base 13: mod_base = OTHER; note = 5-methylcytosine with phosphorothioate linkage
  modified_base 14: mod_base = OTHER; note = Nucleotide with phosphorothioate linkage
  modified_base 15: mod_base = OTHER; note = Nucleotide with phosphorothioate linkage
  modified_base 16: mod_base = OTHER; note = 2'-O-methoxyethyl modified nucleotide with phosphorothioate linkage
  modified_base 17: mod_base = OTHER; note = 2'-O-methoxyethyl modified nucleotide with phosphorothioate linkage
  modified_base 18: mod_base = OTHER; note = 2'-O-methoxyethyl modified thymine with phosphorothioate linkage
  modified_base 19: mod_base = OTHER; note = 2'-O-methoxyethyl modified nucleotide with phosphorothioate linkage
  modified_base 20: mod_base = OTHER; note = 2'-O-methoxyethyl 5-methylcytosine
  misc_feature 1..5: note = RNA
  misc_feature 6..15: note = DNA
  misc_feature 16..20: note = RNA
gcagagctgaagcgaagtgc

SEQ ID NO: 769 - DNA, 20 bp, synthetic construct
  source 1..20: mol_type = other DNA
  modified_base 1: mod_base = OTHER; note = 2'-O-methoxyethyl modified nucleotide with phosphorothioate linkage
  modified_base 2: mod_base = OTHER; note = 2'-O-methoxyethyl 5-methylcytosine with phosphorothioate linkage
  modified_base 3: mod_base = OTHER; note = 2'-O-methoxyethyl modified nucleotide with phosphorothioate linkage
  modified_base 4: mod_base = OTHER; note = 2'-O-methoxyethyl modified nucleotide with phosphorothioate linkage
  modified_base 5: mod_base = OTHER; note = 2'-O-methoxyethyl modified nucleotide with phosphorothioate linkage
  modified_base 6: mod_base = OTHER; note = Nucleotide with phosphorothioate linkage
  modified_base 7: mod_base = OTHER; note = Thymine with phosphorothioate linkage
  modified_base 8: mod_base = OTHER; note = Thymine with phosphorothioate linkage
  modified_base 9: mod_base = OTHER; note = Nucleotide with phosphorothioate linkage
  modified_base 10: mod_base = OTHER; note = Nucleotide with phosphorothioate linkage
  modified_base 11: mod_base = OTHER; note = Nucleotide with phosphorothioate linkage
  modified_base 12: mod_base = OTHER; note = Nucleotide with phosphorothioate linkage
  modified_base 13: mod_base = OTHER; note = 5-methylcytosine with phosphorothioate linkage
  modified_base 14: mod_base = OTHER; note = Nucleotide with phosphorothioate linkage
  modified_base 15: mod_base = OTHER; note = Nucleotide with phosphorothioate linkage
  modified_base 16: mod_base = OTHER; note = 2'-O-methoxyethyl modified nucleotide with phosphorothioate linkage
  modified_base 17: mod_base = OTHER; note = 2'-O-methoxyethyl modified nucleotide with phosphorothioate linkage
  modified_base 18: mod_base = OTHER; note = 2'-O-methoxyethyl modified thymine with phosphorothioate linkage
  modified_base 19: mod_base = OTHER; note = 2'-O-methoxyethyl modified nucleotide with phosphorothioate linkage
  modified_base 20: mod_base = OTHER; note = 2'-O-methoxyethyl 5-methylcytosine
  misc_feature 1..5: note = RNA
  misc_feature 6..15: note = DNA
  misc_feature 16..20: note = RNA
gcagagttgaagcgaagtgc

SEQ ID NO: 770 - DNA, 20 bp, synthetic construct
  source 1..20: mol_type = other DNA
  modified_base 1: mod_base = OTHER; note = 2'-O-methoxyethyl modified nucleotide with phosphorothioate linkage
  modified_base 2: mod_base = OTHER; note = 2'-O-methoxyethyl 5-methylcytosine with phosphorothioate linkage
  modified_base 3: mod_base = OTHER; note = 2'-O-methoxyethyl modified nucleotide with phosphorothioate linkage
  modified_base 4: mod_base = OTHER; note = 2'-O-methoxyethyl modified nucleotide with phosphorothioate linkage
  modified_base 5: mod_base = OTHER; note = 2'-O-methoxyethyl modified nucleotide with phosphorothioate linkage
  modified_base 6: mod_base = OTHER; note = Nucleotide with phosphorothioate linkage
  modified_base 7: mod_base = OTHER; note = Nucleotide with phosphorothioate linkage
  modified_base 8: mod_base = OTHER; note = Nucleotide with phosphorothioate linkage
  modified_base 9: mod_base = OTHER; note = Nucleotide with phosphorothioate linkage
  modified_base 10: mod_base = OTHER; note = Nucleotide with phosphorothioate linkage
  modified_base 11: mod_base = OTHER; note = Nucleotide with phosphorothioate linkage
  modified_base 12: mod_base = OTHER; note = Nucleotide with phosphorothioate linkage
  modified_base 13: mod_base = OTHER; note = 5-methylcytosine with phosphorothioate linkage
  modified_base 14: mod_base = OTHER; note = Nucleotide with phosphorothioate linkage
  modified_base 15: mod_base = OTHER; note = Nucleotide with phosphorothioate linkage
  modified_base 16: mod_base = OTHER; note = 2'-O-methoxyethyl modified nucleotide with phosphorothioate linkage
  modified_base 17: mod_base = OTHER; note = 2'-O-methoxyethyl modified nucleotide with phosphorothioate linkage
  modified_base 18: mod_base = OTHER; note = 2'-O-methoxyethyl modified thymine with phosphorothioate linkage
  modified_base 19: mod_base = OTHER; note = 2'-O-methoxyethyl modified nucleotide with phosphorothioate linkage
  modified_base 20: mod_base = OTHER; note = 2'-O-methoxyethyl 5-methylcytosine
  misc_feature 1..5: note = RNA
  misc_feature 6..15: note = DNA
  misc_feature 16..20: note = RNA
gcagaggagaagcgaagtgc

SEQ ID NO: 771 - DNA, 20 bp, synthetic construct
  source 1..20: mol_type = other DNA
  modified_base 1: mod_base = OTHER; note = 2'-O-methoxyethyl modified nucleotide with phosphorothioate linkage
  modified_base 2: mod_base = OTHER; note = 2'-O-methoxyethyl 5-methylcytosine with phosphorothioate linkage
  modified_base 3: mod_base = OTHER; note = 2'-O-methoxyethyl modified nucleotide with phosphorothioate linkage
  modified_base 4: mod_base = OTHER; note = 2'-O-methoxyethyl modified nucleotide with phosphorothioate linkage
  modified_base 5: mod_base = OTHER; note = 2'-O-methoxyethyl modified nucleotide with phosphorothioate linkage
  modified_base 6: mod_base = OTHER; note = Nucleotide with phosphorothioate linkage
  modified_base 7: mod_base = OTHER; note = Nucleotide with phosphorothioate linkage
  modified_base 8: mod_base = OTHER; note = 5-methylcytosine with phosphorothioate linkage
  modified_base 9: mod_base = OTHER; note = Nucleotide with phosphorothioate linkage
  modified_base 10: mod_base = OTHER; note = Nucleotide with phosphorothioate linkage
  modified_base 11: mod_base = OTHER; note = Nucleotide with phosphorothioate linkage
  modified_base 12: mod_base = OTHER; note = Nucleotide with phosphorothioate linkage
  modified_base 13: mod_base = OTHER; note = 5-methylcytosine with phosphorothioate linkage
  modified_base 14: mod_base = OTHER; note = Nucleotide with phosphorothioate linkage
  modified_base 15: mod_base = OTHER; note = Nucleotide with phosphorothioate linkage
  modified_base 16: mod_base = OTHER; note = 2'-O-methoxyethyl modified nucleotide with phosphorothioate linkage
  modified_base 17: mod_base = OTHER; note = 2'-O-methoxyethyl modified nucleotide with phosphorothioate linkage
  modified_base 18: mod_base = OTHER; note = 2'-O-methoxyethyl modified thymine with phosphorothioate linkage
  modified_base 19: mod_base = OTHER; note = 2'-O-methoxyethyl modified nucleotide with phosphorothioate linkage
  modified_base 20: mod_base = OTHER; note = 2'-O-methoxyethyl 5-methylcytosine
  misc_feature 1..5: note = RNA
  misc_feature 6..15: note = DNA
  misc_feature 16..20: note = RNA
gcagaggcgaagcgaagtgc

SEQ ID NO: 772 - DNA, 20 bp, synthetic construct
  source 1..20: mol_type = other DNA
  modified_base 1: mod_base = OTHER; note = 2'-O-methoxyethyl modified nucleotide with phosphorothioate linkage
  modified_base 2: mod_base = OTHER; note = 2'-O-methoxyethyl 5-methylcytosine with phosphorothioate linkage
  modified_base 3: mod_base = OTHER; note = 2'-O-methoxyethyl modified nucleotide with phosphorothioate linkage
  modified_base 4: mod_base = OTHER; note = 2'-O-methoxyethyl modified nucleotide with phosphorothioate linkage
  modified_base 5: mod_base = OTHER; note = 2'-O-methoxyethyl modified nucleotide with phosphorothioate linkage
  modified_base 6: mod_base = OTHER; note = Nucleotide with phosphorothioate linkage
  modified_base 7: mod_base = OTHER; note = Nucleotide with phosphorothioate linkage
  modified_base 8: mod_base = OTHER; note = Nucleotide with phosphorothioate linkage
  modified_base 9: mod_base = OTHER; note = Nucleotide with phosphorothioate linkage
  modified_base 10: mod_base = OTHER; note = Nucleotide with phosphorothioate linkage
  modified_base 11: mod_base = OTHER; note = Nucleotide with phosphorothioate linkage
  modified_base 12: mod_base = OTHER; note = Nucleotide with phosphorothioate linkage
  modified_base 13: mod_base = OTHER; note = 5-methylcytosine with phosphorothioate linkage
  modified_base 14: mod_base = OTHER; note = Nucleotide with phosphorothioate linkage
  modified_base 15: mod_base = OTHER; note = Nucleotide with phosphorothioate linkage
  modified_base 16: mod_base = OTHER; note = 2'-O-methoxyethyl modified nucleotide with phosphorothioate linkage
  modified_base 17: mod_base = OTHER; note = 2'-O-methoxyethyl modified nucleotide with phosphorothioate linkage
  modified_base 18: mod_base = OTHER; note = 2'-O-methoxyethyl modified thymine with phosphorothioate linkage
  modified_base 19: mod_base = OTHER; note = 2'-O-methoxyethyl modified nucleotide with phosphorothioate linkage
  modified_base 20: mod_base = OTHER; note = 2'-O-methoxyethyl 5-methylcytosine
  misc_feature 1..5: note = RNA
  misc_feature 6..15: note = DNA
  misc_feature 16..20: note = RNA
gcagaggggaagcgaagtgc

SEQ ID NO: 773 - DNA, 20 bp, synthetic construct
  source 1..20: mol_type = other DNA
  modified_base 1: mod_base = OTHER; note = 2'-O-methoxyethyl 5-methylcytosine with phosphorothioate linkage
  modified_base 2: mod_base = OTHER; note = 2'-O-methoxyethyl modified nucleotide with phosphorothioate linkage
  modified_base 3: mod_base = OTHER; note = 2'-O-methoxyethyl modified nucleotide with phosphorothioate linkage
  modified_base 4: mod_base = OTHER; note = 2'-O-methoxyethyl modified nucleotide with phosphorothioate linkage
  modified_base 5: mod_base = OTHER; note = 2'-O-methoxyethyl modified nucleotide with phosphorothioate linkage
  modified_base 6: mod_base = OTHER; note = Nucleotide with phosphorothioate linkage
  modified_base 7: mod_base = OTHER; note = Thymine with phosphorothioate linkage
  modified_base 8: mod_base = OTHER; note = Nucleotide with phosphorothioate linkage
  modified_base 9: mod_base = OTHER; note = Nucleotide with phosphorothioate linkage
  modified_base 10: mod_base = OTHER; note = Nucleotide with phosphorothioate linkage
  modified_base 11: mod_base = OTHER; note = 8-amino-guanosine with phosphorothioate linkage
  modified_base 12: mod_base = OTHER; note = 5-methylcytosine with phosphorothioate linkage
  modified_base 13: mod_base = OTHER; note = Nucleotide with phosphorothioate linkage
  modified_base 14: mod_base = OTHER; note = Nucleotide with phosphorothioate linkage
  modified_base 15: mod_base = OTHER; note = Nucleotide with phosphorothioate linkage
  modified_base 16: mod_base = OTHER; note = Locked nucleic acid with phosphorothioate linkage
  modified_base 17: mod_base = OTHER; note = 2'-O-methoxyethyl modified thymine with phosphorothioate linkage
  modified_base 18: mod_base = OTHER; note = Locked nucleic acid with phosphorothioate linkage
  modified_base 19: mod_base = OTHER; note = 2'-O-methoxyethyl 5-methylcytosine with phosphorothioate linkage
  modified_base 20: mod_base = OTHER; note = Tert-butylguanidine bridged nucleic acid
  misc_feature 1..5: note = RNA
  misc_feature 6..15: note = DNA
  misc_feature 16..20: note = RNA
cagaggtgaagcgaagtgca

SEQ ID NO: 774 - DNA, 20 bp, synthetic construct
  source 1..20: mol_type = other DNA
  modified_base 1: mod_base = OTHER; note = 2'-O-methoxyethyl modified nucleotide with phosphorothioate linkage
  modified_base 2: mod_base = OTHER; note = 2'-O-methoxyethyl 5-methylcytosine with phosphorothioate linkage
  modified_base 3: mod_base = OTHER; note = 2'-O-methoxyethyl modified nucleotide with phosphorothioate linkage
  modified_base 4: mod_base = OTHER; note = 2'-O-methoxyethyl modified nucleotide with phosphorothioate linkage
  modified_base 5: mod_base = OTHER; note = 2'-O-methoxyethyl modified nucleotide with phosphorothioate linkage
  modified_base 6: mod_base = OTHER; note = Nucleotide with phosphorothioate linkage
  modified_base 7: mod_base = OTHER; note = Nucleotide with phosphorothioate linkage
  modified_base 8: mod_base = OTHER; note = Thymine with phosphorothioate linkage
  modified_base 9: mod_base = OTHER; note = Nucleotide with phosphorothioate linkage
  modified_base 10: mod_base = OTHER; note = Nucleotide with phosphorothioate linkage
  modified_base 11: mod_base = OTHER; note = Nucleotide with phosphorothioate linkage
  modified_base 12: mod_base = OTHER; note = Nucleotide with phosphorothioate linkage
  modified_base 13: mod_base = OTHER; note = 5-methylcytosine with phosphorothioate linkage
  modified_base 14: mod_base = OTHER; note = Nucleotide with phosphorothioate linkage
  modified_base 15: mod_base = OTHER; note = Nucleotide with phosphorothioate linkage
  modified_base 16: mod_base = OTHER; note = 2'-O-methoxyethyl modified nucleotide with phosphorothioate linkage
  modified_base 17: mod_base = OTHER; note = 2'-O-methoxyethyl modified nucleotide with phosphorothioate linkage
  modified_base 18: mod_base = OTHER; note = 2'-O-methoxyethyl modified thymine with phosphorothioate linkage
  modified_base 19: mod_base = OTHER; note = 2'-O-methoxyethyl modified thymine with phosphorothioate linkage
  modified_base 20: mod_base = OTHER; note = 2'-O-methoxyethyl 5-methylcytosine
  misc_feature 1..5: note = RNA
  misc_feature 6..15: note = DNA
  misc_feature 16..20: note = RNA
gcagaggtgaagcggagttc

SEQ ID NO: 775 - DNA, 20 bp, synthetic construct
  source 1..20: mol_type = other DNA
  modified_base 1: mod_base = OTHER; note = 2'-O-methoxyethyl modified nucleotide with phosphorothioate linkage
  modified_base 2: mod_base = OTHER; note = 2'-O-methoxyethyl 5-methylcytosine with phosphorothioate linkage
  modified_base 3: mod_base = OTHER; note = 2'-O-methoxyethyl modified nucleotide with phosphorothioate linkage
  modified_base 4: mod_base = OTHER; note = 2'-O-methoxyethyl modified nucleotide with phosphorothioate linkage
  modified_base 5: mod_base = OTHER; note = Nucleotide with phosphorothioate linkage
  modified_base 6: mod_base = OTHER; note = Nucleotide with phosphorothioate linkage
  modified_base 7: mod_base = OTHER; note = Nucleotide with phosphorothioate linkage
  modified_base 8: mod_base = OTHER; note = Thymine with phosphorothioate linkage
  modified_base 9: mod_base = OTHER; note = Nucleotide with phosphorothioate linkage
  modified_base 10: mod_base = OTHER; note = 2'-O-methoxyethyl modified nucleotide with phosphorothioate linkage
  modified_base 11: mod_base = OTHER; note = Nucleotide with phosphorothioate linkage
  modified_base 12: mod_base = OTHER; note = Nucleotide with phosphorothioate linkage
  modified_base 13: mod_base = OTHER; note = 5-methylcytosine with phosphorothioate linkage
  modified_base 14: mod_base = OTHER; note = Nucleotide with phosphorothioate linkage
  modified_base 15: mod_base = OTHER; note = Nucleotide with phosphorothioate linkage
  modified_base 16: mod_base = OTHER; note = 2'-O-methoxyethyl modified nucleotide with phosphorothioate linkage
  modified_base 17: mod_base = OTHER; note = Locked nucleic acid with phosphorothioate linkage
  modified_base 18: mod_base = OTHER; note = 2'-O-methoxyethyl modified thymine with phosphorothioate linkage
  modified_base 19: mod_base = OTHER; note = Locked nucleic acid with phosphorothioate linkage
  modified_base 20: mod_base = OTHER; note = Locked 5-methylcytosine
  misc_feature 1..4: note = RNA
  misc_feature 5..9: note = DNA
  misc_feature 10: note = RNA
  misc_feature 11..15: note = DNA
  misc_feature 16..20: note = RNA
gcagaggtgaagcgaaatgc

SEQ ID NO: 776 - DNA, 20 bp, synthetic construct
  source 1..20: mol_type = other DNA
  modified_base 1: mod_base = OTHER; note = 2'-O-methoxyethyl modified nucleotide with phosphorothioate linkage
  modified_base 2: mod_base = OTHER; note = 2'-O-methoxyethyl 5-methylcytosine with phosphorothioate linkage
  modified_base 3: mod_base = OTHER; note = 2'-O-methoxyethyl modified nucleotide with phosphorothioate linkage
  modified_base 4: mod_base = OTHER; note = 2'-O-methoxyethyl modified nucleotide with phosphorothioate linkage
  modified_base 5: mod_base = OTHER; note = 2'-O-methoxyethyl modified nucleotide with phosphorothioate linkage
  modified_base 6: mod_base = OTHER; note = Nucleotide with phosphorothioate linkage
  modified_base 7: mod_base = OTHER; note = Nucleotide with phosphorothioate linkage
  modified_base 8: mod_base = OTHER; note = Thymine with phosphorothioate linkage
  modified_base 9: mod_base = OTHER; note = Nucleotide with phosphorothioate linkage
  modified_base 10: mod_base = OTHER; note = Nucleotide with phosphorothioate linkage
  modified_base 11: mod_base = OTHER; note = Nucleotide with phosphorothioate linkage
  modified_base 12: mod_base = OTHER; note = Nucleotide with phosphorothioate linkage
  modified_base 13: mod_base = OTHER; note = 5-methylcytosine with phosphorothioate linkage
  modified_base 14: mod_base = OTHER; note = Nucleotide with phosphorothioate linkage
  modified_base 15: mod_base = OTHER; note = Thymine with phosphorothioate linkage
  modified_base 16: mod_base = OTHER; note = 2'-O-methoxyethyl modified nucleotide with phosphorothioate linkage
  modified_base 17: mod_base = OTHER; note = 2'-O-methoxyethyl modified nucleotide with phosphorothioate linkage
  modified_base 18: mod_base = OTHER; note = 2'-O-methoxyethyl modified thymine with phosphorothioate linkage
  modified_base 19: mod_base = OTHER; note = 2'-O-methoxyethyl modified thymine with phosphorothioate linkage
  modified_base 20: mod_base = OTHER; note = 2'-O-methoxyethyl 5-methylcytosine
  misc_feature 1..5: note = RNA
  misc_feature 6..15: note = DNA
  misc_feature 16..20: note = RNA
gcagaggtgaagcgtagttc

SEQ ID NO: 777 - DNA, 20 bp, synthetic construct
  source 1..20: mol_type = other DNA
  modified_base 1: mod_base = OTHER; note = 2'-O-methoxyethyl modified nucleotide with phosphorothioate linkage
  modified_base 2: mod_base = OTHER; note = 2'-O-methoxyethyl 5-methylcytosine with phosphorothioate linkage
  modified_base 3: mod_base = OTHER; note = 2'-O-methoxyethyl modified nucleotide with phosphorothioate linkage
  modified_base 4: mod_base = OTHER; note = 2'-O-methoxyethyl modified nucleotide with phosphorothioate linkage
  modified_base 5: mod_base = OTHER; note = 2'-O-methoxyethyl modified nucleotide with phosphorothioate linkage
  modified_base 6: mod_base = OTHER; note = Nucleotide with phosphorothioate linkage
  modified_base 7: mod_base = OTHER; note = Nucleotide with phosphorothioate linkage
  modified_base 8: mod_base = OTHER; note = Thymine with phosphorothioate linkage
  modified_base 9: mod_base = OTHER; note = Nucleotide with phosphorothioate linkage
  modified_base 10: mod_base = OTHER; note = Nucleotide with phosphorothioate linkage
  modified_base 11: mod_base = OTHER; note = Nucleotide with phosphorothioate linkage
  modified_base 12: mod_base = OTHER; note = Nucleotide with phosphorothioate linkage
  modified_base 13: mod_base = OTHER; note = 5-methylcytosine with phosphorothioate linkage
  modified_base 14: mod_base = OTHER; note = Nucleotide with phosphorothioate linkage
  modified_base 15: mod_base = OTHER; note = 5-methylcytosine with phosphorothioate linkage
  modified_base 16: mod_base = OTHER; note = 2'-O-methoxyethyl modified nucleotide with phosphorothioate linkage
  modified_base 17: mod_base = OTHER; note = 2'-O-methoxyethyl modified nucleotide with phosphorothioate linkage
  modified_base 18: mod_base = OTHER; note = 2'-O-methoxyethyl modified thymine with phosphorothioate linkage
  modified_base 19: mod_base = OTHER; note = 2'-O-methoxyethyl modified thymine with phosphorothioate linkage
  modified_base 20: mod_base = OTHER; note = 2'-O-methoxyethyl 5-methylcytosine
  misc_feature 1..5: note = RNA
  misc_feature 6..15: note = DNA
  misc_feature 16..20: note = RNA
gcagaggtgaagcgcagttc

SEQ ID NO: 778 - DNA, 20 bp, synthetic construct
  source 1..20: mol_type = other DNA
  modified_base 1: mod_base = OTHER; note = 2'-O-methoxyethyl modified nucleotide with phosphorothioate linkage
  modified_base 2: mod_base = OTHER; note = 2'-O-methoxyethyl 5-methylcytosine with phosphorothioate linkage
  modified_base 3: mod_base = OTHER; note = 2'-O-methoxyethyl modified nucleotide with phosphorothioate linkage
  modified_base 4: mod_base = OTHER; note = 2'-O-methoxyethyl modified nucleotide with phosphorothioate linkage
  modified_base 5: mod_base = OTHER; note = 2'-O-methoxyethyl modified nucleotide with phosphorothioate linkage
  modified_base 6: mod_base = OTHER; note = Nucleotide with phosphorothioate linkage
  modified_base 7: mod_base = OTHER; note = Nucleotide with phosphorothioate linkage
  modified_base 8: mod_base = OTHER; note = Thymine with phosphorothioate linkage
  modified_base 9: mod_base = OTHER; note = Nucleotide with phosphorothioate linkage
  modified_base 10: mod_base = OTHER; note = Nucleotide with phosphorothioate linkage
  modified_base 11: mod_base = OTHER; note = Nucleotide with phosphorothioate linkage
  modified_base 12: mod_base = OTHER; note = Nucleotide with phosphorothioate linkage
  modified_base 13: mod_base = OTHER; note = 5-methylcytosine with phosphorothioate linkage
  modified_base 14: mod_base = OTHER; note = Nucleotide with phosphorothioate linkage
  modified_base 15: mod_base = OTHER; note = Nucleotide with phosphorothioate linkage
  modified_base 16: mod_base = OTHER; note = 2'-O-methoxyethyl modified nucleotide with phosphorothioate linkage
  modified_base 17: mod_base = OTHER; note = 2'-O-methoxyethyl modified nucleotide with phosphorothioate linkage
  modified_base 18: mod_base = OTHER; note = 2'-O-methoxyethyl modified thymine with phosphorothioate linkage
  modified_base 19: mod_base = OTHER; note = 2'-O-methoxyethyl modified thymine with phosphorothioate linkage
  modified_base 20: mod_base = OTHER; note = 2'-O-methoxyethyl 5-methylcytosine
  misc_feature 1..5: note = RNA
  misc_feature 6..15: note = DNA
  misc_feature 16..20: note = RNA
gcagaggtgaagcaaagttc

SEQ ID NO: 779 - DNA, 20 bp, synthetic construct
  source 1..20: mol_type = other DNA
  modified_base 1: mod_base = OTHER; note = 2'-O-methoxyethyl modified nucleotide with phosphorothioate linkage
  modified_base 2: mod_base = OTHER; note = 2'-O-methoxyethyl 5-methylcytosine with phosphorothioate linkage
  modified_base 3: mod_base = OTHER; note = 2'-O-methoxyethyl modified nucleotide with phosphorothioate linkage
  modified_base 4: mod_base = OTHER; note = 2'-O-methoxyethyl modified nucleotide with phosphorothioate linkage
  modified_base 5: mod_base = OTHER; note = 2'-O-methoxyethyl modified nucleotide with phosphorothioate linkage
  modified_base 6: mod_base = OTHER; note = Nucleotide with phosphorothioate linkage
  modified_base 7: mod_base = OTHER; note = Nucleotide with phosphorothioate linkage
  modified_base 8: mod_base = OTHER; note = Thymine with phosphorothioate linkage
  modified_base 9: mod_base = OTHER; note = Nucleotide with phosphorothioate linkage
  modified_base 10: mod_base = OTHER; note = Nucleotide with phosphorothioate linkage
  modified_base 11: mod_base = OTHER; note = Nucleotide with phosphorothioate linkage
  modified_base 12: mod_base = OTHER; note = Nucleotide with phosphorothioate linkage
  modified_base 13: mod_base = OTHER; note = 5-methylcytosine with phosphorothioate linkage
  modified_base 14: mod_base = OTHER; note = Thymine with phosphorothioate linkage
  modified_base 15: mod_base = OTHER; note = Nucleotide with phosphorothioate linkage
  modified_base 16: mod_base = OTHER; note = 2'-O-methoxyethyl modified nucleotide with phosphorothioate linkage
  modified_base 17: mod_base = OTHER; note = 2'-O-methoxyethyl modified nucleotide with phosphorothioate linkage
  modified_base 18: mod_base = OTHER; note = 2'-O-methoxyethyl modified thymine with phosphorothioate linkage
  modified_base 19: mod_base = OTHER; note = 2'-O-methoxyethyl modified thymine with phosphorothioate linkage
  modified_base 20: mod_base = OTHER; note = 2'-O-methoxyethyl 5-methylcytosine
  misc_feature 1..5: note = RNA
  misc_feature 6..15: note = DNA
  misc_feature 16..20: note = RNA
gcagaggtgaagctaagttc

SEQ ID NO: 780 - DNA, 20 bp, synthetic construct
  source 1..20: mol_type = other DNA
  modified_base 1: mod_base = OTHER; note = 2'-O-methoxyethyl modified nucleotide with phosphorothioate linkage
  modified_base 2: mod_base = OTHER; note = 2'-O-methoxyethyl 5-methylcytosine with phosphorothioate linkage
  modified_base 3: mod_base = OTHER; note = 2'-O-methoxyethyl modified nucleotide with phosphorothioate linkage
  modified_base 4: mod_base = OTHER; note = 2'-O-methoxyethyl modified nucleotide with phosphorothioate linkage
  modified_base 5: mod_base = OTHER; note = 2'-O-methoxyethyl modified nucleotide with phosphorothioate linkage
  modified_base 6: mod_base = OTHER; note = Nucleotide with phosphorothioate linkage
  modified_base 7: mod_base = OTHER; note = Nucleotide with phosphorothioate linkage
  modified_base 8: mod_base = OTHER; note = Thymine with phosphorothioate linkage
  modified_base 9: mod_base = OTHER; note = Nucleotide with phosphorothioate linkage
  modified_base 10: mod_base = OTHER; note = Nucleotide with phosphorothioate linkage
  modified_base 11: mod_base = OTHER; note = Nucleotide with phosphorothioate linkage
  modified_base 12: mod_base = OTHER; note = Nucleotide with phosphorothioate linkage
  modified_base 13: mod_base = OTHER; note = 5-methylcytosine with phosphorothioate linkage
  modified_base 14: mod_base = OTHER; note = 5-methylcytosine with phosphorothioate linkage
  modified_base 15: mod_base = OTHER; note = Nucleotide with phosphorothioate linkage
  modified_base 16: mod_base = OTHER; note = 2'-O-methoxyethyl modified nucleotide with phosphorothioate linkage
  modified_base 17: mod_base = OTHER; note = 2'-O-methoxyethyl modified nucleotide with phosphorothioate linkage
  modified_base 18: mod_base = OTHER; note = 2'-O-methoxyethyl modified thymine with phosphorothioate linkage
  modified_base 19: mod_base = OTHER; note = 2'-O-methoxyethyl modified thymine with phosphorothioate linkage
  modified_base 20: mod_base = OTHER; note = 2'-O-methoxyethyl 5-methylcytosine
  misc_feature 1..5: note = RNA
  misc_feature 6..15: note = DNA
  misc_feature 16..20: note = RNA
gcagaggtgaagccaagttc

SEQ ID NO: 781 - DNA, 20 bp, synthetic construct
  source 1..20: mol_type = other DNA
  modified_base 1: mod_base = OTHER; note = 2'-O-methoxyethyl modified nucleotide with phosphorothioate linkage
  modified_base 2: mod_base = OTHER; note = 2'-O-methoxyethyl 5-methylcytosine with phosphorothioate linkage
  modified_base 3: mod_base = OTHER; note = 2'-O-methoxyethyl modified nucleotide with phosphorothioate linkage
  modified_base 4: mod_base = OTHER; note = 2'-O-methoxyethyl modified nucleotide with phosphorothioate linkage
  modified_base 5: mod_base = OTHER; note = 2'-O-methoxyethyl modified nucleotide with phosphorothioate linkage
  modified_base 6: mod_base = OTHER; note = Nucleotide with phosphorothioate linkage
  modified_base 7: mod_base = OTHER; note = Nucleotide with phosphorothioate linkage
  modified_base 8: mod_base = OTHER; note = Thymine with phosphorothioate linkage
  modified_base 9: mod_base = OTHER; note = Nucleotide with phosphorothioate linkage
  modified_base 10: mod_base = OTHER; note = Nucleotide with phosphorothioate linkage
  modified_base 11: mod_base = OTHER; note = Nucleotide with phosphorothioate linkage
  modified_base 12: mod_base = OTHER; note = Nucleotide with phosphorothioate linkage
  modified_base 13: mod_base = OTHER; note = Nucleotide with phosphorothioate linkage
  modified_base 14: mod_base = OTHER; note = Nucleotide with phosphorothioate linkage
  modified_base 15: mod_base = OTHER; note = Nucleotide with phosphorothioate linkage
  modified_base 16: mod_base = OTHER; note = 2'-O-methoxyethyl modified nucleotide with phosphorothioate linkage
  modified_base 17: mod_base = OTHER; note = 2'-O-methoxyethyl modified nucleotide with phosphorothioate linkage
  modified_base 18: mod_base = OTHER; note = 2'-O-methoxyethyl modified thymine with phosphorothioate linkage
  modified_base 19: mod_base = OTHER; note = 2'-O-methoxyethyl modified thymine with phosphorothioate linkage
  modified_base 20: mod_base = OTHER; note = 2'-O-methoxyethyl 5-methylcytosine
  misc_feature 1..5: note = RNA
  misc_feature 6..15: note = DNA
  misc_feature 16..20: note = RNA
gcagaggtgaagagaagttc

SEQ ID NO: 782 - DNA, 20 bp, synthetic construct
  source 1..20: mol_type = other DNA
  modified_base 1: mod_base = OTHER; note = 2'-O-methoxyethyl modified nucleotide with phosphorothioate linkage
  modified_base 2: mod_base = OTHER; note = 2'-O-methoxyethyl 5-methylcytosine with phosphorothioate linkage
  modified_base 3: mod_base = OTHER; note = 2'-O-methoxyethyl modified nucleotide with phosphorothioate linkage
  modified_base 4: mod_base = OTHER; note = 2'-O-methoxyethyl modified nucleotide with phosphorothioate linkage
  modified_base 5: mod_base = OTHER; note = 2'-O-methoxyethyl modified nucleotide with phosphorothioate linkage
  modified_base 6: mod_base = OTHER; note = Nucleotide with phosphorothioate linkage
  modified_base 7: mod_base = OTHER; note = Nucleotide with phosphorothioate linkage
  modified_base 8: mod_base = OTHER; note = Thymine with phosphorothioate linkage
  modified_base 9: mod_base = OTHER; note = Nucleotide with phosphorothioate linkage
  modified_base 10: mod_base = OTHER; note = Nucleotide with phosphorothioate linkage
  modified_base 11: mod_base = OTHER; note = Nucleotide with phosphorothioate linkage
  modified_base 12: mod_base = OTHER; note = Nucleotide with phosphorothioate linkage
  modified_base 13: mod_base = OTHER; note = Thymine with phosphorothioate linkage
  modified_base 14: mod_base = OTHER; note = Nucleotide with phosphorothioate linkage
  modified_base 15: mod_base = OTHER; note = Nucleotide with phosphorothioate linkage
  modified_base 16: mod_base = OTHER; note = 2'-O-methoxyethyl modified nucleotide with phosphorothioate linkage
  modified_base 17: mod_base = OTHER; note = 2'-O-methoxyethyl modified nucleotide with phosphorothioate linkage
  modified_base 18: mod_base = OTHER; note = 2'-O-methoxyethyl modified thymine with phosphorothioate linkage
  modified_base 19: mod_base = OTHER; note = 2'-O-methoxyethyl modified thymine with phosphorothioate linkage
  modified_base 20: mod_base = OTHER; note = 2'-O-methoxyethyl 5-methylcytosine
  misc_feature 1..5: note = RNA
  misc_feature 6..15: note = DNA
  misc_feature 16..20: note = RNA
gcagaggtgaagtgaagttc

SEQ ID NO: 783 - DNA, 20 bp, synthetic construct
  source 1..20: mol_type = other DNA
  modified_base 1: mod_base = OTHER; note = 2'-O-methoxyethyl modified nucleotide with phosphorothioate linkage
  modified_base 2: mod_base = OTHER; note = 2'-O-methoxyethyl 5-methylcytosine with phosphorothioate linkage
  modified_base 3: mod_base = OTHER; note = 2'-O-methoxyethyl modified nucleotide with phosphorothioate linkage
  modified_base 4: mod_base = OTHER; note = 2'-O-methoxyethyl modified nucleotide with phosphorothioate linkage
  modified_base 5: mod_base = OTHER; note = 2'-O-methoxyethyl modified nucleotide with phosphorothioate linkage
  modified_base 6: mod_base = OTHER; note = Nucleotide with phosphorothioate linkage
  modified_base 7: mod_base = OTHER; note = Nucleotide with phosphorothioate linkage
  modified_base 8: mod_base = OTHER; note = Thymine with phosphorothioate linkage
  modified_base 9: mod_base = OTHER; note = Nucleotide with phosphorothioate linkage
  modified_base 10: mod_base = OTHER; note = Nucleotide with phosphorothioate linkage
  modified_base 11: mod_base = OTHER; note = Nucleotide with phosphorothioate linkage
  modified_base 12: mod_base = OTHER; note = Nucleotide with phosphorothioate linkage
  modified_base 13: mod_base = OTHER; note = Nucleotide with phosphorothioate linkage
  modified_base 14: mod_base = OTHER; note = Nucleotide with phosphorothioate linkage
  modified_base 15: mod_base = OTHER; note = Nucleotide with phosphorothioate linkage
  modified_base 16: mod_base = OTHER; note = 2'-O-methoxyethyl modified nucleotide with phosphorothioate linkage
  modified_base 17: mod_base = OTHER; note = 2'-O-methoxyethyl modified nucleotide with phosphorothioate linkage
  modified_base 18: mod_base = OTHER; note = 2'-O-methoxyethyl modified thymine with phosphorothioate linkage
  modified_base 19: mod_base = OTHER; note = 2'-O-methoxyethyl modified thymine with phosphorothioate linkage
  modified_base 20: mod_base = OTHER; note = 2'-O-methoxyethyl 5-methylcytosine
  misc_feature 1..5: note = RNA
  misc_feature 6..15: note = DNA
  misc_feature 16..20: note = RNA
gcagaggtgaagggaagttc

SEQ ID NO: 784 - DNA, 20 bp, synthetic construct
  source 1..20: mol_type = other DNA
  modified_base 1: mod_base = OTHER; note = 2'-O-methoxyethyl modified nucleotide with phosphorothioate linkage
  modified_base 2: mod_base = OTHER; note = 2'-O-methoxyethyl 5-methylcytosine with phosphorothioate linkage
  modified_base 3: mod_base = OTHER; note = 2'-O-methoxyethyl modified nucleotide with phosphorothioate linkage
  modified_base 4: mod_base = OTHER; note = 2'-O-methoxyethyl modified nucleotide with phosphorothioate linkage
  modified_base 5: mod_base = OTHER; note = 2'-O-methoxyethyl modified nucleotide with phosphorothioate linkage
  modified_base 6: mod_base = OTHER; note = Nucleotide with phosphorothioate linkage
  modified_base 7: mod_base = OTHER; note = Nucleotide with phosphorothioate linkage
  modified_base 8: mod_base = OTHER; note = Thymine with phosphorothioate linkage
  modified_base 9: mod_base = OTHER; note = Nucleotide with phosphorothioate linkage
  modified_base 10: mod_base = OTHER; note = Nucleotide with phosphorothioate linkage
  modified_base 11: mod_base = OTHER; note = Nucleotide with phosphorothioate linkage
  modified_base 12: mod_base = OTHER; note = Nucleotide with phosphorothioate linkage
  modified_base 13: mod_base = OTHER; note = 5-methylcytosine with phosphorothioate linkage
  modified_base 14: mod_base = OTHER; note = Nucleotide with phosphorothioate linkage
  modified_base 15: mod_base = OTHER; note = Nucleotide with phosphorothioate linkage
  modified_base 16: mod_base = OTHER; note = 2'-O-methyl modified abasic nucleotide with phosphorothioate linkage
  modified_base 17: mod_base = OTHER; note = 2'-O-methoxyethyl modified nucleotide with phosphorothioate linkage
  modified_base 18: mod_base = OTHER; note = 2'-O-methoxyethyl modified thymine with phosphorothioate linkage
  modified_base 19: mod_base = OTHER; note = 2'-O-methoxyethyl modified thymine with phosphorothioate linkage
  modified_base 20: mod_base = OTHER; note = 2'-O-methoxyethyl 5-methylcytosine
  misc_feature 1..5: note = RNA
  misc_feature 6..15: note = DNA
  misc_feature 16..20: note = RNA
gcagaggtgaagcgangttc

SEQ ID NO: 785 - DNA, 20 bp, synthetic construct
  source 1..20: mol_type = other DNA
  modified_base 1: mod_base = OTHER; note = 2'-O-methoxyethyl modified nucleotide with phosphorothioate linkage
  modified_base 2: mod_base = OTHER; note = 2'-O-methoxyethyl 5-methylcytosine with phosphorothioate linkage
  modified_base 3: mod_base = OTHER; note = 2'-O-methoxyethyl modified nucleotide with phosphorothioate linkage
  modified_base 4: mod_base = OTHER; note = 2'-O-methoxyethyl modified nucleotide with phosphorothioate linkage
  modified_base 5: mod_base = OTHER; note = 2'-O-methoxyethyl modified nucleotide with phosphorothioate linkage
  modified_base 6: mod_base = OTHER; note = Nucleotide with phosphorothioate linkage
  modified_base 7: mod_base = OTHER; note = Nucleotide with phosphorothioate linkage
  modified_base 8: mod_base = OTHER; note = Thymine with phosphorothioate linkage
  modified_base 9: mod_base = OTHER; note = Nucleotide with phosphorothioate linkage
  modified_base 10: mod_base = OTHER; note = Nucleotide with phosphorothioate linkage
  modified_base 11: mod_base = OTHER; note = Nucleotide with phosphorothioate linkage
  modified_base 12: mod_base = OTHER; note = Nucleotide with phosphorothioate linkage
  modified_base 13: mod_base = OTHER; note = 5-methylcytosine with phosphorothioate linkage
  modified_base 14: mod_base = OTHER; note = Nucleotide with phosphorothioate linkage
  modified_base 15: mod_base = OTHER; note = Nucleotide with phosphorothioate linkage
  modified_base 16: mod_base = OTHER; note = 2'-O-methoxyethyl modified nucleotide with phosphorothioate linkage
  modified_base 17: mod_base = OTHER; note = 2'-O-methyl modified abasic nucleotide with phosphorothioate linkage
  modified_base 18: mod_base = OTHER; note = 2'-O-methoxyethyl modified thymine with phosphorothioate linkage
  modified_base 19: mod_base = OTHER; note = 2'-O-methoxyethyl modified thymine with phosphorothioate linkage
  modified_base 20: mod_base = OTHER; note = 2'-O-methoxyethyl 5-methylcytosine
  misc_feature 1..5: note = RNA
  misc_feature 6..15: note = DNA
  misc_feature 16..20: note = RNA
gcagaggtgaagcgaanttc

SEQ ID NO: 786 - DNA, 20 bp, synthetic construct
  source 1..20: mol_type = other DNA
  modified_base 1: mod_base = OTHER; note = 2'-O-methoxyethyl modified nucleotide with phosphorothioate linkage
  modified_base 2: mod_base = OTHER; note = 2'-O-methoxyethyl 5-methylcytosine with phosphorothioate linkage
  modified_base 3: mod_base = OTHER; note = 2'-O-methoxyethyl modified nucleotide with phosphorothioate linkage
  modified_base 4: mod_base = OTHER; note = 2'-O-methoxyethyl modified nucleotide with phosphorothioate linkage
  modified_base 5: mod_base = OTHER; note = 2'-O-methoxyethyl modified nucleotide with phosphorothioate linkage
  modified_base 6: mod_base = OTHER; note = Nucleotide with phosphorothioate linkage
  modified_base 7: mod_base = OTHER; note = Nucleotide with phosphorothioate linkage
  modified_base 8: mod_base = OTHER; note = Thymine with phosphorothioate linkage
  modified_base 9: mod_base = OTHER; note = Nucleotide with phosphorothioate linkage
  modified_base 10: mod_base = OTHER; note = Nucleotide with phosphorothioate linkage
  modified_base 11: mod_base = OTHER; note = Nucleotide with phosphorothioate linkage
  modified_base 12: mod_base = OTHER; note = Nucleotide with phosphorothioate linkage
  modified_base 13: mod_base = OTHER; note = 5-methylcytosine with phosphorothioate linkage
  modified_base 14: mod_base = OTHER; note = Nucleotide with phosphorothioate linkage
  modified_base 15: mod_base = OTHER; note = Nucleotide with phosphorothioate linkage
  modified_base 16: mod_base = OTHER; note = 2'-O-methoxyethyl modified nucleotide with phosphorothioate linkage
  modified_base 17: mod_base = OTHER; note = 2'-O-methoxyethyl modified nucleotide with phosphorothioate linkage
  modified_base 18: mod_base = OTHER; note = 2'-O-methyl modified abasic nucleotide with phosphorothioate linkage
  modified_base 19: mod_base = OTHER; note = 2'-O-methoxyethyl modified thymine with phosphorothioate linkage
  modified_base 20: mod_base = OTHER; note = 2'-O-methoxyethyl 5-methylcytosine
  misc_feature 1..5: note = RNA
  misc_feature 6..15: note = DNA
  misc_feature 16..20: note = RNA
gcagaggtgaagcgaagntc

SEQ ID NO: 787 - DNA, 20 bp, synthetic construct
  source 1..20: mol_type = other DNA
  modified_base 1: mod_base = OTHER; note = 2'-O-methoxyethyl modified nucleotide with phosphorothioate linkage
  modified_base 2: mod_base = OTHER; note = 2'-O-methoxyethyl 5-methylcytosine with phosphorothioate linkage
  modified_base 3: mod_base = OTHER; note = 2'-O-methoxyethyl modified nucleotide with phosphorothioate linkage
  modified_base 4: mod_base = OTHER; note = 2'-O-methoxyethyl modified nucleotide with phosphorothioate linkage
  modified_base 5: mod_base = OTHER; note = 2'-O-methoxyethyl modified nucleotide with phosphorothioate linkage
  modified_base 6: mod_base = OTHER; note = Nucleotide with phosphorothioate linkage
  modified_base 7: mod_base = OTHER; note = Nucleotide with phosphorothioate linkage
  modified_base 8: mod_base = OTHER; note = Thymine with phosphorothioate linkage
  modified_base 9: mod_base = OTHER; note = Nucleotide with phosphorothioate linkage
  modified_base 10: mod_base = OTHER; note = Nucleotide with phosphorothioate linkage
  modified_base 11: mod_base = OTHER; note = Nucleotide with phosphorothioate linkage
  modified_base 12: mod_base = OTHER; note = Nucleotide with phosphorothioate linkage
  modified_base 13: mod_base = OTHER; note = 5-methylcytosine with phosphorothioate linkage
  modified_base 14: mod_base = OTHER; note = Nucleotide with phosphorothioate linkage
  modified_base 15: mod_base = OTHER; note = Nucleotide with phosphorothioate linkage
  modified_base 16: mod_base = OTHER; note = 2'-O-methoxyethyl modified nucleotide with phosphorothioate linkage
  modified_base 17: mod_base = OTHER; note = 2'-O-methoxyethyl modified nucleotide with phosphorothioate linkage
  modified_base 18: mod_base = OTHER; note = 2'-O-methoxyethyl modified thymine with phosphorothioate linkage
  modified_base 19: mod_base = OTHER; note = 2'-O-methyl modified abasic nucleotide with phosphorothioate linkage
  modified_base 20: mod_base = OTHER; note = 2'-O-methoxyethyl 5-methylcytosine
  misc_feature 1..5: note = RNA
  misc_feature 6..15: note = DNA
  misc_feature 16..20: note = RNA
gcagaggtgaagcgaagtnc

SEQ ID NO: 788 - DNA, 20 bp, synthetic construct
  source 1..20: mol_type = other DNA
  modified_base 1: mod_base = OTHER; note = 2'-O-methoxyethyl modified nucleotide with phosphorothioate linkage
  modified_base 2: mod_base = OTHER; note = 2'-O-methoxyethyl 5-methylcytosine with phosphorothioate linkage
  modified_base 3: mod_base = OTHER; note = 2'-O-methoxyethyl modified nucleotide with phosphorothioate linkage
  modified_base 4: mod_base = OTHER; note = 2'-O-methoxyethyl modified nucleotide with phosphorothioate linkage
  modified_base 5: mod_base = OTHER; note = 2'-O-methoxyethyl modified nucleotide with phosphorothioate linkage
  modified_base 6: mod_base = OTHER; note = Nucleotide with phosphorothioate linkage
  modified_base 7: mod_base = OTHER; note = Nucleotide with phosphorothioate linkage
  modified_base 8: mod_base = OTHER; note = Thymine with phosphorothioate linkage
  modified_base 9: mod_base = OTHER; note = Nucleotide with phosphorothioate linkage
  modified_base 10: mod_base = OTHER; note = Nucleotide with phosphorothioate linkage
  modified_base 11: mod_base = OTHER; note = Nucleotide with phosphorothioate linkage
  modified_base 12: mod_base = OTHER; note = Nucleotide with phosphorothioate linkage
  modified_base 13: mod_base = OTHER; note = 5-methylcytosine with phosphorothioate linkage
  modified_base 14: mod_base = OTHER; note = Nucleotide with phosphorothioate linkage
  modified_base 15: mod_base = OTHER; note = Nucleotide with phosphorothioate linkage
  modified_base 16: mod_base = OTHER; note = 2'-O-methoxyethyl modified nucleotide with phosphorothioate linkage
  modified_base 17: mod_base = OTHER; note = 2'-O-methoxyethyl modified nucleotide with phosphorothioate linkage
  modified_base 18: mod_base = OTHER; note = 2'-O-methoxyethyl modified thymine with phosphorothioate linkage
  modified_base 19: mod_base = OTHER; note = 2'-O-methoxyethyl modified thymine with phosphorothioate linkage
  modified_base 20: mod_base = OTHER; note = 2'-O-methyl modified abasic nucleotide
  misc_feature 1..5: note = RNA
  misc_feature 6..15: note = DNA
  misc_feature 16..20: note = RNA
gcagaggtgaagcgaagttn

SEQ ID NO: 789 - DNA, 20 bp, synthetic construct
  source 1..20: mol_type = other DNA
  modified_base 1: mod_base = OTHER; note = 2'-O-methoxyethyl modified nucleotide with phosphorothioate linkage
  modified_base 2: mod_base = OTHER; note = 2'-O-methoxyethyl 5-methylcytosine with phosphorothioate linkage
  modified_base 3: mod_base = OTHER; note = 2'-O-methoxyethyl modified nucleotide with phosphorothioate linkage
  modified_base 4: mod_base = OTHER; note = 2'-O-methoxyethyl modified nucleotide with phosphorothioate linkage
  modified_base 5: mod_base = OTHER; note = Nucleotide with phosphorothioate linkage
  modified_base 6: mod_base = OTHER; note = Nucleotide with phosphorothioate linkage
  modified_base 7: mod_base = OTHER; note = Nucleotide with phosphorothioate linkage
  modified_base 8: mod_base = OTHER; note = Thymine with phosphorothioate linkage
  modified_base 9: mod_base = OTHER; note = Nucleotide with phosphorothioate linkage
  modified_base 10: mod_base = OTHER; note = 2'-O-methoxyethyl modified nucleotide with phosphorothioate linkage
  modified_base 11: mod_base = OTHER; note = Nucleotide with phosphorothioate linkage
  modified_base 12: mod_base = OTHER; note = Nucleotide with phosphorothioate linkage
  modified_base 13: mod_base = OTHER; note = 5-methylcytosine with phosphorothioate linkage
  modified_base 14: mod_base = OTHER; note = Nucleotide with phosphorothioate linkage
  modified_base 15: mod_base = OTHER; note = Nucleotide with phosphorothioate linkage
  modified_base 16: mod_base = OTHER; note = 2'-O-methoxyethyl modified nucleotide with phosphorothioate linkage
  modified_base 17: mod_base = OTHER; note = Locked 5-methylcytosine with phosphorothioate linkage
  modified_base 18: mod_base = OTHER; note = 2'-O-methoxyethyl modified thymine with phosphorothioate linkage
  modified_base 19: mod_base = OTHER; note = Locked nucleic acid with phosphorothioate linkage
  modified_base 20: mod_base = OTHER; note = Locked 5-methylcytosine
  misc_feature 1..4: note = RNA
  misc_feature 5..9: note = DNA
  misc_feature 10: note = RNA
  misc_feature 11..15: note = DNA
  misc_feature 16..20: note = RNA
gcagaggtgaagcgaactgc

SEQ ID NO: 790 - DNA, 20 bp, synthetic construct
  source 1..20: mol_type = other DNA
  modified_base 1: mod_base = OTHER; note = 2'-O-methoxyethyl modified nucleotide with phosphorothioate linkage
  modified_base 2: mod_base = OTHER; note = 2'-O-methoxyethyl 5-methylcytosine with phosphorothioate linkage
  modified_base 3: mod_base = OTHER; note = 2'-O-methoxyethyl modified nucleotide with phosphorothioate linkage
  modified_base 4: mod_base = OTHER; note = 2'-O-methoxyethyl modified nucleotide with phosphorothioate linkage
  modified_base 5: mod_base = OTHER; note = Nucleotide with phosphorothioate linkage
  modified_base 6: mod_base = OTHER; note = Nucleotide with phosphorothioate linkage
  modified_base 7: mod_base = OTHER; note = Nucleotide with phosphorothioate linkage
  modified_base 8: mod_base = OTHER; note = Thymine with phosphorothioate linkage
  modified_base 9: mod_base = OTHER; note = Nucleotide with phosphorothioate linkage
  modified_base 10: mod_base = OTHER; note = 2'-O-methoxyethyl modified nucleotide with phosphorothioate linkage
  modified_base 11: mod_base = OTHER; note = Nucleotide with phosphorothioate linkage
  modified_base 12: mod_base = OTHER; note = Nucleotide with phosphorothioate linkage
  modified_base 13: mod_base = OTHER; note = 5-methylcytosine with phosphorothioate linkage
  modified_base 14: mod_base = OTHER; note = Nucleotide with phosphorothioate linkage
  modified_base 15: mod_base = OTHER; note = Nucleotide with phosphorothioate linkage
  modified_base 16: mod_base = OTHER; note = 2'-O-methoxyethyl modified nucleotide with phosphorothioate linkage
  modified_base 17: mod_base = OTHER; note = Locked thymine with phosphorothioate linkage
  modified_base 18: mod_base = OTHER; note = 2'-O-methoxyethyl modified thymine with phosphorothioate linkage
  modified_base 19: mod_base = OTHER; note = Locked nucleic acid with phosphorothioate linkage
  modified_base 20: mod_base = OTHER; note = Locked 5-methylcytosine
  misc_feature 1..4: note = RNA
  misc_feature 5..9: note = DNA
  misc_feature 10: note = RNA
  misc_feature 11..15: note = DNA
  misc_feature 16..20: note = RNA
gcagaggtgaagcgaattgc

SEQ ID NO: 791 - DNA, 20 bp, synthetic construct
  source 1..20: mol_type = other DNA
  modified_base 1: mod_base = OTHER; note = 2'-O-methoxyethyl modified nucleotide with phosphorothioate linkage
  modified_base 2: mod_base = OTHER; note = 2'-O-methoxyethyl 5-methylcytosine with phosphorothioate linkage
  modified_base 3: mod_base = OTHER; note = 2'-O-methoxyethyl modified nucleotide with phosphorothioate linkage
  modified_base 4: mod_base = OTHER; note = 2'-O-methoxyethyl modified nucleotide with phosphorothioate linkage
  modified_base 5: mod_base = OTHER; note = Nucleotide with phosphorothioate linkage
  modified_base 6: mod_base = OTHER; note = Nucleotide with phosphorothioate linkage
  modified_base 7: mod_base = OTHER; note = Nucleotide with phosphorothioate linkage
  modified_base 8: mod_base = OTHER; note = Thymine with phosphorothioate linkage
  modified_base 9: mod_base = OTHER; note = Nucleotide with phosphorothioate linkage
  modified_base 10: mod_base = OTHER; note = 2'-O-methoxyethyl modified nucleotide with phosphorothioate linkage
  modified_base 11: mod_base = OTHER; note = Nucleotide with phosphorothioate linkage
  modified_base 12: mod_base = OTHER; note = Nucleotide with phosphorothioate linkage
  modified_base 13: mod_base = OTHER; note = 5-methylcytosine with phosphorothioate linkage
  modified_base 14: mod_base = OTHER; note = Nucleotide with phosphorothioate linkage
  modified_base 15: mod_base = OTHER; note = Nucleotide with phosphorothioate linkage
  modified_base 16: mod_base = OTHER; note = 2'-O-methoxyethyl modified nucleotide with phosphorothioate linkage
  modified_base 17: mod_base = OTHER; note = Locked nucleic acid with phosphorothioate linkage
  modified_base 18: mod_base = OTHER; note = 2'-O-methoxyethyl modified thymine with phosphorothioate linkage
  modified_base 19: mod_base = OTHER; note = Locked nucleic acid with phosphorothioate linkage
  modified_base 20: mod_base = OTHER; note = Locked 5-methylcytosine
  misc_feature 1..4: note = RNA
  misc_feature 5..9: note = DNA
  misc_feature 10: note = RNA
  misc_feature 11..15: note = DNA
  misc_feature 16..20: note = RNA
gcagaggtgaagcgaagtac

SEQ ID NO: 792 - DNA, 20 bp, synthetic construct
  source 1..20: mol_type = other DNA
  modified_base 1: mod_base = OTHER; note = 2'-O-methoxyethyl modified nucleotide with phosphorothioate linkage
  modified_base 2: mod_base = OTHER; note = 2'-O-methoxyethyl 5-methylcytosine with phosphorothioate linkage
  modified_base 3: mod_base = OTHER; note = 2'-O-methoxyethyl modified nucleotide with phosphorothioate linkage
  modified_base 4: mod_base = OTHER; note = 2'-O-methoxyethyl modified nucleotide with phosphorothioate linkage
  modified_base 5: mod_base = OTHER; note = Nucleotide with phosphorothioate linkage
  modified_base 6: mod_base = OTHER; note = Nucleotide with phosphorothioate linkage
  modified_base 7: mod_base = OTHER; note = Nucleotide with phosphorothioate linkage
  modified_base 8: mod_base = OTHER; note = Thymine with phosphorothioate linkage
  modified_base 9: mod_base = OTHER; note = Nucleotide with phosphorothioate linkage
  modified_base 10: mod_base = OTHER; note = 2'-O-methoxyethyl modified nucleotide with phosphorothioate linkage
  modified_base 11: mod_base = OTHER; note = Nucleotide with phosphorothioate linkage
  modified_base 12: mod_base = OTHER; note = Nucleotide with phosphorothioate linkage
  modified_base 13: mod_base = OTHER; note = 5-methylcytosine with phosphorothioate linkage
  modified_base 14: mod_base = OTHER; note = Nucleotide with phosphorothioate linkage
  modified_base 15: mod_base = OTHER; note = Nucleotide with phosphorothioate linkage
  modified_base 16: mod_base = OTHER; note = 2'-O-methoxyethyl modified nucleotide with phosphorothioate linkage
  modified_base 17: mod_base = OTHER; note = Locked nucleic acid with phosphorothioate linkage
  modified_base 18: mod_base = OTHER; note = 2'-O-methoxyethyl modified thymine with phosphorothioate linkage
  modified_base 19: mod_base = OTHER; note = Locked 5-methylcytosine with phosphorothioate linkage
  modified_base 20: mod_base = OTHER; note = Locked 5-methylcytosine
  misc_feature 1..4: note = RNA
  misc_feature 5..9: note = DNA
  misc_feature 10: note = RNA
  misc_feature 11..15: note = DNA
  misc_feature 16..20: note = RNA
gcagaggtgaagcgaagtcc

SEQ ID NO: 793 - DNA, 20 bp, synthetic construct
  source 1..20: mol_type = other DNA
  modified_base 1: mod_base = OTHER; note = 2'-O-methoxyethyl modified nucleotide with phosphorothioate linkage
  modified_base 2: mod_base = OTHER; note = 2'-O-methoxyethyl 5-methylcytosine with phosphorothioate linkage
  modified_base 3: mod_base = OTHER; note = 2'-O-methoxyethyl modified nucleotide with phosphorothioate linkage
  modified_base 4: mod_base = OTHER; note = 2'-O-methoxyethyl modified nucleotide with phosphorothioate linkage
  modified_base 5: mod_base = OTHER; note = Nucleotide with phosphorothioate linkage
  modified_base 6: mod_base = OTHER; note = Nucleotide with phosphorothioate linkage
  modified_base 7: mod_base = OTHER; note = Nucleotide with phosphorothioate linkage
  modified_base 8: mod_base = OTHER; note = Thymine with phosphorothioate linkage
  modified_base 9: mod_base = OTHER; note = Nucleotide with phosphorothioate linkage
  modified_base 10: mod_base = OTHER; note = 2'-O-methoxyethyl modified nucleotide with phosphorothioate linkage
  modified_base 11: mod_base = OTHER; note = Nucleotide with phosphorothioate linkage
  modified_base 12: mod_base = OTHER; note = Nucleotide with phosphorothioate linkage
  modified_base 13: mod_base = OTHER; note = 5-methylcytosine with phosphorothioate linkage
  modified_base 14: mod_base = OTHER; note = Nucleotide with phosphorothioate linkage
  modified_base 15: mod_base = OTHER; note = Nucleotide with phosphorothioate linkage
  modified_base 16: mod_base = OTHER; note = 2'-O-methoxyethyl modified nucleotide with phosphorothioate linkage
  modified_base 17: mod_base = OTHER; note = Locked nucleic acid with phosphorothioate linkage
  modified_base 18: mod_base = OTHER; note = 2'-O-methoxyethyl modified thymine with phosphorothioate linkage
  modified_base 19: mod_base = OTHER; note = Locked thymine with phosphorothioate linkage
  modified_base 20: mod_base = OTHER; note = Locked 5-methylcytosine
  misc_feature 1..4: note = RNA
  misc_feature 5..9: note = DNA
  misc_feature 10: note = RNA
  misc_feature 11..15: note = DNA
  misc_feature 16..20: note = RNA
gcagaggtgaagcgaagttc

SEQ ID NO: 794 - DNA, 20 bp, synthetic construct
  source 1..20: mol_type = other DNA
  modified_base 1: mod_base = OTHER; note = 2'-O-methoxyethyl modified nucleotide with phosphorothioate linkage
  modified_base 2: mod_base = OTHER; note = 2'-O-methoxyethyl 5-methylcytosine with phosphorothioate linkage
  modified_base 3: mod_base = OTHER; note = 2'-O-methoxyethyl modified nucleotide with phosphorothioate linkage
  modified_base 4: mod_base = OTHER; note = 2'-O-methoxyethyl modified nucleotide with phosphorothioate linkage
  modified_base 5: mod_base = OTHER; note = Nucleotide with phosphorothioate linkage
  modified_base 6: mod_base = OTHER; note = Nucleotide with phosphorothioate linkage
  modified_base 7: mod_base = OTHER; note = Nucleotide with phosphorothioate linkage
  modified_base 8: mod_base = OTHER; note = Thymine with phosphorothioate linkage
  modified_base 9: mod_base = OTHER; note = Nucleotide with phosphorothioate linkage
  modified_base 10: mod_base = OTHER; note = 2'-O-methoxyethyl modified nucleotide with phosphorothioate linkage
  modified_base 11: mod_base = OTHER; note = Nucleotide with phosphorothioate linkage
  modified_base 12: mod_base = OTHER; note = Nucleotide with phosphorothioate linkage
  modified_base 13: mod_base = OTHER; note = 5-methylcytosine with phosphorothioate linkage
  modified_base 14: mod_base = OTHER; note = Nucleotide with phosphorothioate linkage
  modified_base 15: mod_base = OTHER; note = Nucleotide with phosphorothioate linkage
  modified_base 16: mod_base = OTHER; note = 2'-O-methoxyethyl modified nucleotide with phosphorothioate linkage
  modified_base 17: mod_base = OTHER; note = Locked nucleic acid with phosphorothioate linkage
  modified_base 18: mod_base = OTHER; note = 2'-O-methoxyethyl modified thymine with phosphorothioate linkage
  modified_base 19: mod_base = OTHER; note = Locked nucleic acid with phosphorothioate linkage
  modified_base 20: mod_base = OTHER; note = Locked nucleic acid
  misc_feature 1..4: note = RNA
  misc_feature 5..9: note = DNA
  misc_feature 10: note = RNA
  misc_feature 11..15: note = DNA
  misc_feature 16..20: note = RNA
gcagaggtgaagcgaagtga

SEQ ID NO: 795 - DNA, 20 bp, synthetic construct
  source 1..20: mol_type = other DNA
  modified_base 1: mod_base = OTHER; note = 2'-O-methoxyethyl modified nucleotide with phosphorothioate linkage
  modified_base 2: mod_base = OTHER; note = 2'-O-methoxyethyl 5-methylcytosine with phosphorothioate linkage
  modified_base 3: mod_base = OTHER; note = 2'-O-methoxyethyl modified nucleotide with phosphorothioate linkage
  modified_base 4: mod_base = OTHER; note = 2'-O-methoxyethyl modified nucleotide with phosphorothioate linkage
  modified_base 5: mod_base = OTHER; note = Nucleotide with phosphorothioate linkage
  modified_base 6: mod_base = OTHER; note = Nucleotide with phosphorothioate linkage
  modified_base 7: mod_base = OTHER; note = Nucleotide with phosphorothioate linkage
  modified_base 8: mod_base = OTHER; note = Thymine with phosphorothioate linkage
  modified_base 9: mod_base = OTHER; note = Nucleotide with phosphorothioate linkage
  modified_base 10: mod_base = OTHER; note = 2'-O-methoxyethyl modified nucleotide with phosphorothioate linkage
  modified_base 11: mod_base = OTHER; note = Nucleotide with phosphorothioate linkage
  modified_base 12: mod_base = OTHER; note = Nucleotide with phosphorothioate linkage
  modified_base 13: mod_base = OTHER; note = 5-methylcytosine with phosphorothioate linkage
  modified_base 14: mod_base = OTHER; note = Nucleotide with phosphorothioate linkage
  modified_base 15: mod_base = OTHER; note = Nucleotide with phosphorothioate linkage
  modified_base 16: mod_base = OTHER; note = 2'-O-methoxyethyl modified nucleotide with phosphorothioate linkage
  modified_base 17: mod_base = OTHER; note = Locked nucleic acid with phosphorothioate linkage
  modified_base 18: mod_base = OTHER; note = 2'-O-methoxyethyl modified thymine with phosphorothioate linkage
  modified_base 19: mod_base = OTHER; note = Locked nucleic acid with phosphorothioate linkage
  modified_base 20: mod_base = OTHER; note = Locked nucleic acid
  misc_feature 1..4: note = RNA
  misc_feature 5..9: note = DNA
  misc_feature 10: note = RNA
  misc_feature 11..15: note = DNA
  misc_feature 16..20: note = RNA
gcagaggtgaagcgaagtgg

SEQ ID NO: 796 - DNA, 20 bp, synthetic construct
  source 1..20: mol_type = other DNA
  modified_base 1: mod_base = OTHER; note = 2'-O-methoxyethyl modified nucleotide with phosphorothioate linkage
  modified_base 2: mod_base = OTHER; note = 2'-O-methoxyethyl 5-methylcytosine with phosphorothioate linkage
  modified_base 3: mod_base = OTHER; note = 2'-O-methoxyethyl modified nucleotide with phosphorothioate linkage
  modified_base 4: mod_base = OTHER; note = 2'-O-methoxyethyl modified nucleotide with phosphorothioate linkage
  modified_base 5: mod_base = OTHER; note = Nucleotide with phosphorothioate linkage
  modified_base 6: mod_base = OTHER; note = Nucleotide with phosphorothioate linkage
  modified_base 7: mod_base = OTHER; note = Nucleotide with phosphorothioate linkage
  modified_base 8: mod_base = OTHER; note = Thymine with phosphorothioate linkage
  modified_base 9: mod_base = OTHER; note = Nucleotide with phosphorothioate linkage
  modified_base 10: mod_base = OTHER; note = 2'-O-methoxyethyl modified nucleotide with phosphorothioate linkage
  modified_base 11: mod_base = OTHER; note = Nucleotide with phosphorothioate linkage
  modified_base 12: mod_base = OTHER; note = Nucleotide with phosphorothioate linkage
  modified_base 13: mod_base = OTHER; note = 5-methylcytosine with phosphorothioate linkage
  modified_base 14: mod_base = OTHER; note = Nucleotide with phosphorothioate linkage
  modified_base 15: mod_base = OTHER; note = Nucleotide with phosphorothioate linkage
  modified_base 16: mod_base = OTHER; note = 2'-O-methoxyethyl modified nucleotide with phosphorothioate linkage
  modified_base 17: mod_base = OTHER; note = Locked nucleic acid with phosphorothioate linkage
  modified_base 18: mod_base = OTHER; note = 2'-O-methoxyethyl modified thymine with phosphorothioate linkage
  modified_base 19: mod_base = OTHER; note = Locked nucleic acid with phosphorothioate linkage
  modified_base 20: mod_base = OTHER; note = Locked thymine
  misc_feature 1..4: note = RNA
  misc_feature 5..9: note = DNA
  misc_feature 10: note = RNA
  misc_feature 11..15: note = DNA
  misc_feature 16..20: note = RNA
gcagaggtgaagcgaagtgt

SEQ ID NO: 797 - DNA, 21 bp, synthetic construct
  source 1..21: mol_type = other DNA
  modified_base 1: mod_base = OTHER; note = 2'-O-methoxyethyl modified nucleotide with phosphorothioate linkage
  modified_base 2: mod_base = OTHER; note = 2'-O-methoxyethyl modified nucleotide with phosphorothioate linkage
  modified_base 3: mod_base = OTHER; note = 2'-O-methoxyethyl modified thymine with phosphorothioate linkage
  modified_base 4: mod_base = OTHER; note = 2'-O-methoxyethyl modified nucleotide with phosphorothioate linkage
  modified_base 5: mod_base = OTHER; note = 2'-O-methoxyethyl modified nucleotide with phosphorothioate linkage
  modified_base 6: mod_base = OTHER; note = Nucleotide with phosphorothioate linkage
  modified_base 7: mod_base = OTHER; note = Nucleotide with phosphorothioate linkage
  modified_base 8: mod_base = OTHER; note = 5-methylcytosine with phosphorothioate linkage
  modified_base 9: mod_base = OTHER; note = Nucleotide with phosphorothioate linkage
  modified_base 10: mod_base = OTHER; note = Nucleotide with phosphorothioate linkage
  modified_base 11: mod_base = OTHER; note = Nucleotide with phosphorothioate linkage
  modified_base 12: mod_base = OTHER; note = Nucleotide with phosphorothioate linkage
  modified_base 13: mod_base = OTHER; note = Thymine with phosphorothioate linkage
  modified_base 14: mod_base = OTHER; note = Nucleotide with phosphorothioate linkage
  modified_base 15: mod_base = OTHER; note = 5-methylcytosine with phosphorothioate linkage
  modified_base 16: mod_base = OTHER; note = 2'-O-methoxyethyl modified nucleotide with phosphorothioate linkage
  modified_base 17: mod_base = OTHER; note = 2'-O-methoxyethyl 5-methylcytosine with phosphorothioate linkage
  modified_base 18: mod_base = OTHER; note = 2'-O-methoxyethyl modified nucleotide with phosphorothioate linkage
  modified_base 19: mod_base = OTHER; note = 2'-O-methoxyethyl 5-methylcytosine with phosphorothioate linkage
  modified_base 20: mod_base = OTHER; note = 2'-O-methoxyethyl modified nucleotide with phosphorothioate linkage
  modified_base 21: mod_base = OTHER; note = 2'-O-methoxyethyl modified nucleotide
  misc_feature 1..5: note = RNA
  misc_feature 6..15: note = DNA
  misc_feature 16..21: note = RNA
ggtgaagcgaagtgcacacgg

SEQ ID NO: 798 - DNA, 21 bp, synthetic construct
  source 1..21: mol_type = other DNA
  modified_base 1: mod_base = OTHER; note = 2'-O-methoxyethyl modified nucleotide with phosphorothioate linkage
  modified_base 2: mod_base = OTHER; note = 2'-O-methoxyethyl modified nucleotide with phosphorothioate linkage
  modified_base 3: mod_base = OTHER; note = 2'-O-methoxyethyl modified thymine with phosphorothioate linkage
  modified_base 4: mod_base = OTHER; note = 2'-O-methoxyethyl modified nucleotide with phosphorothioate linkage
  modified_base 5: mod_base = OTHER; note = 2'-O-methoxyethyl modified nucleotide with phosphorothioate linkage
  modified_base 6: mod_base = OTHER; note = 2'-O-methoxyethyl modified nucleotide with phosphorothioate linkage
  modified_base 7: mod_base = OTHER; note = Nucleotide with phosphorothioate linkage
  modified_base 8: mod_base = OTHER; note = 5-methylcytosine with phosphorothioate linkage
  modified_base 9: mod_base = OTHER; note = Nucleotide with phosphorothioate linkage
  modified_base 10: mod_base = OTHER; note = Nucleotide with phosphorothioate linkage
  modified_base 11: mod_base = OTHER; note = Nucleotide with phosphorothioate linkage
  modified_base 12: mod_base = OTHER; note = Nucleotide with phosphorothioate linkage
  modified_base 13: mod_base = OTHER; note = Thymine with phosphorothioate linkage
  modified_base 14: mod_base = OTHER; note = Nucleotide with phosphorothioate linkage
  modified_base 15: mod_base = OTHER; note = 5-methylcytosine with phosphorothioate linkage
  modified_base 16: mod_base = OTHER; note = Nucleotide with phosphorothioate linkage
  modified_base 17: mod_base = OTHER; note = 2'-O-methoxyethyl 5-methylcytosine with phosphorothioate linkage
  modified_base 18: mod_base = OTHER; note = 2'-O-methoxyethyl modified nucleotide with phosphorothioate linkage
  modified_base 19: mod_base = OTHER; note = 2'-O-methoxyethyl 5-methylcytosine with phosphorothioate linkage
  modified_base 20: mod_base = OTHER; note = 2'-O-methoxyethyl modified nucleotide with phosphorothioate linkage
  modified_base 21: mod_base = OTHER; note = 2'-O-methoxyethyl modified nucleotide
  misc_feature 1..6: note = RNA
  misc_feature 7..16: note = DNA
  misc_feature 17..21: note = RNA
ggtgaagcgaagtgcacacgg

SEQ ID NO: 799 - DNA, 21 bp, synthetic construct
  source 1..21: mol_type = other DNA
  modified_base 1: mod_base = OTHER; note = 2'-O-methoxyethyl modified nucleotide with phosphorothioate linkage
  modified_base 2: mod_base = OTHER; note = 2'-O-methoxyethyl modified nucleotide with phosphorothioate linkage
  modified_base 3: mod_base = OTHER; note = 2'-O-methoxyethyl modified nucleotide with phosphorothioate linkage
  modified_base 4: mod_base = OTHER; note = 2'-O-methoxyethyl modified nucleotide with phosphorothioate linkage
  modified_base 5: mod_base = OTHER; note = 2'-O-methoxyethyl modified thymine with phosphorothioate linkage
  modified_base 6: mod_base = OTHER; note = Nucleotide with phosphorothioate linkage
  modified_base 7: mod_base = OTHER; note = Nucleotide with phosphorothioate linkage
  modified_base 8: mod_base = OTHER; note = Nucleotide with phosphorothioate linkage
  modified_base 9: mod_base = OTHER; note = Nucleotide with phosphorothioate linkage
  modified_base 10: mod_base = OTHER; note = 5-methylcytosine with phosphorothioate linkage
  modified_base 11: mod_base = OTHER; note = Nucleotide with phosphorothioate linkage
  modified_base 12: mod_base = OTHER; note = Nucleotide with phosphorothioate linkage
  modified_base 13: mod_base = OTHER; note = Nucleotide with phosphorothioate linkage
  modified_base 14: mod_base = OTHER; note = Nucleotide with phosphorothioate linkage
  modified_base 15: mod_base = OTHER; note = Thymine with phosphorothioate linkage
  modified_base 16: mod_base = OTHER; note = 2'-O-methoxyethyl modified nucleotide with phosphorothioate linkage
  modified_base 17: mod_base = OTHER; note = 2'-O-methoxyethyl 5-methylcytosine with phosphorothioate linkage
  modified_base 18: mod_base = OTHER; note = 2'-O-methoxyethyl modified nucleotide with phosphorothioate linkage
  modified_base 19: mod_base = OTHER; note = 2'-O-methoxyethyl 5-methylcytosine with phosphorothioate linkage
  modified_base 20: mod_base = OTHER; note = 2'-O-methoxyethyl modified nucleotide with phosphorothioate linkage
  modified_base 21: mod_base = OTHER; note = 2'-O-methoxyethyl 5-methylcytosine
  misc_feature 1..5: note = RNA
  misc_feature 6..15: note = DNA
  misc_feature 16..21: note = RNA
gaggtgaagcgaagtgcacac

SEQ ID NO: 800 - DNA, 21 bp, synthetic construct
  source 1..21: mol_type = other DNA
  modified_base 1: mod_base = OTHER; note = 2'-O-methoxyethyl modified nucleotide with phosphorothioate linkage
  modified_base 2: mod_base = OTHER; note = 2'-O-methoxyethyl modified nucleotide with phosphorothioate linkage
  modified_base 3: mod_base = OTHER; note = 2'-O-methoxyethyl modified nucleotide with phosphorothioate linkage
  modified_base 4: mod_base = OTHER; note = 2'-O-methoxyethyl modified nucleotide with phosphorothioate linkage
  modified_base 5: mod_base = OTHER; note = 2'-O-methoxyethyl modified thymine with phosphorothioate linkage
  modified_base 6: mod_base = OTHER; note = 2'-O-methoxyethyl modified nucleotide with phosphorothioate linkage
  modified_base 7: mod_base = OTHER; note = Nucleotide with phosphorothioate linkage
  modified_base 8: mod_base = OTHER; note = Nucleotide with phosphorothioate linkage
  modified_base 9: mod_base = OTHER; note = Nucleotide with phosphorothioate linkage
  modified_base 10: mod_base = OTHER; note = 5-methylcytosine with phosphorothioate linkage
  modified_base 11: mod_base = OTHER; note = Nucleotide with phosphorothioate linkage
  modified_base 12: mod_base = OTHER; note = Nucleotide with phosphorothioate linkage
  modified_base 13: mod_base = OTHER; note = Nucleotide with phosphorothioate linkage
  modified_base 14: mod_base = OTHER; note = Nucleotide with phosphorothioate linkage
  modified_base 15: mod_base = OTHER; note = Thymine with phosphorothioate linkage
  modified_base 16: mod_base = OTHER; note = Nucleotide with phosphorothioate linkage
  modified_base 17: mod_base = OTHER; note = 2'-O-methoxyethyl 5-methylcytosine with phosphorothioate linkage
  modified_base 18: mod_base = OTHER; note = 2'-O-methoxyethyl modified nucleotide with phosphorothioate linkage
  modified_base 19: mod_base = OTHER; note = 2'-O-methoxyethyl 5-methylcytosine with phosphorothioate linkage
  modified_base 20: mod_base = OTHER; note = 2'-O-methoxyethyl modified nucleotide with phosphorothioate linkage
  modified_base 21: mod_base = OTHER; note = 2'-O-methoxyethyl 5-methylcytosine
  misc_feature 1..6: note = RNA
  misc_feature 7..16: note = DNA
  misc_feature 17..21: note = RNA
gaggtgaagcgaagtgcacac

SEQ ID NO: 801 - DNA, 21 bp, synthetic construct
  source 1..21: mol_type = other DNA
  modified_base 1: mod_base = OTHER; note = 2'-O-methoxyethyl modified nucleotide with phosphorothioate linkage
  modified_base 2: mod_base = OTHER; note = 2'-O-methoxyethyl modified nucleotide with phosphorothioate linkage
  modified_base 3: mod_base = OTHER; note = 2'-O-methoxyethyl modified nucleotide with phosphorothioate linkage
  modified_base 4: mod_base = OTHER; note = 2'-O-methoxyethyl modified nucleotide with phosphorothioate linkage
  modified_base 5: mod_base = OTHER; note = 2'-O-methoxyethyl modified nucleotide with phosphorothioate linkage
  modified_base 6: mod_base = OTHER; note = Thymine with phosphorothioate linkage
  modified_base 7: mod_base = OTHER; note = Nucleotide with phosphorothioate linkage
  modified_base 8: mod_base = OTHER; note = Nucleotide with phosphorothioate linkage
  modified_base 9: mod_base = OTHER; note = Nucleotide with phosphorothioate linkage
  modified_base 10: mod_base = OTHER; note = Nucleotide with phosphorothioate linkage
  modified_base 11: mod_base = OTHER; note = 5-methylcytosine with phosphorothioate linkage
  modified_base 12: mod_base = OTHER; note = Nucleotide with phosphorothioate linkage
  modified_base 13: mod_base = OTHER; note = Nucleotide with phosphorothioate linkage
  modified_base 14: mod_base = OTHER; note = Nucleotide with phosphorothioate linkage
  modified_base 15: mod_base = OTHER; note = Nucleotide with phosphorothioate linkage
  modified_base 16: mod_base = OTHER; note = 2'-O-methoxyethyl modified thymine with phosphorothioate linkage
  modified_base 17: mod_base = OTHER; note = 2'-O-methoxyethyl modified nucleotide with phosphorothioate linkage
  modified_base 18: mod_base = OTHER; note = 2'-O-methoxyethyl 5-methylcytosine with phosphorothioate linkage
  modified_base 19: mod_base = OTHER; note = 2'-O-methoxyethyl modified nucleotide with phosphorothioate linkage
  modified_base 20: mod_base = OTHER; note = 2'-O-methoxyethyl 5-methylcytosine with phosphorothioate linkage
  modified_base 21: mod_base = OTHER; note = 2'-O-methoxyethyl modified nucleotide
  misc_feature 1..5: note = RNA
  misc_feature 6..15: note = DNA
  misc_feature 16..21: note = RNA
agaggtgaagcgaagtgcaca

SEQ ID NO: 802 - DNA, 21 bp, synthetic construct
  source 1..21: mol_type = other DNA
  modified_base 1: mod_base = OTHER; note = 2'-O-methoxyethyl modified nucleotide with phosphorothioate linkage
  modified_base 2: mod_base = OTHER; note = 2'-O-methoxyethyl modified nucleotide with phosphorothioate linkage
  modified_base 3: mod_base = OTHER; note = 2'-O-methoxyethyl modified nucleotide with phosphorothioate linkage
  modified_base 4: mod_base = OTHER; note = 2'-O-methoxyethyl modified nucleotide with phosphorothioate linkage
  modified_base 5: mod_base = OTHER; note = 2'-O-methoxyethyl modified nucleotide with phosphorothioate linkage
  modified_base 6: mod_base = OTHER; note = 2'-O-methoxyethyl modified thymine with phosphorothioate linkage
  modified_base 7: mod_base = OTHER; note = Nucleotide with phosphorothioate linkage
  modified_base 8: mod_base = OTHER; note = Nucleotide with phosphorothioate linkage
  modified_base 9: mod_base = OTHER; note = Nucleotide with phosphorothioate linkage
  modified_base 10: mod_base = OTHER; note = Nucleotide with phosphorothioate linkage
  modified_base 11: mod_base = OTHER; note = 5-methylcytosine with phosphorothioate linkage
  modified_base 12: mod_base = OTHER; note = Nucleotide with phosphorothioate linkage
  modified_base 13: mod_base = OTHER; note = Nucleotide with phosphorothioate linkage
  modified_base 14: mod_base = OTHER; note = Nucleotide with phosphorothioate linkage
  modified_base 15: mod_base = OTHER; note = Nucleotide with phosphorothioate linkage
  modified_base 16: mod_base = OTHER; note = Thymine with phosphorothioate linkage
  modified_base 17: mod_base = OTHER; note = 2'-O-methoxyethyl modified nucleotide with phosphorothioate linkage
  modified_base 18: mod_base = OTHER; note = 2'-O-methoxyethyl 5-methylcytosine with phosphorothioate linkage
  modified_base 19: mod_base = OTHER; note = 2'-O-methoxyethyl modified nucleotide with phosphorothioate linkage
  modified_base 20: mod_base = OTHER; note = 2'-O-methoxyethyl 5-methylcytosine with phosphorothioate linkage
  modified_base 21: mod_base = OTHER; note = 2'-O-methoxyethyl modified nucleotide
  misc_feature 1..6: note = RNA
  misc_feature 7..16: note = DNA
  misc_feature 17..21: note = RNA
agaggtgaagcgaagtgcaca

SEQ ID NO: 803 - DNA, 21 bp, synthetic construct
  source 1..21: mol_type = other DNA
  modified_base 1: mod_base = OTHER; note = 2'-O-methoxyethyl modified nucleotide with phosphorothioate linkage
  modified_base 2: mod_base = OTHER; note = 2'-O-methoxyethyl 5-methylcytosine with phosphorothioate linkage
  modified_base 3: mod_base = OTHER; note = 2'-O-methoxyethyl modified nucleotide with phosphorothioate linkage
  modified_base 4: mod_base = OTHER; note = 2'-O-methoxyethyl modified nucleotide with phosphorothioate linkage
  modified_base 5: mod_base = OTHER; note = 2'-O-methoxyethyl modified nucleotide with phosphorothioate linkage
  modified_base 6: mod_base = OTHER; note = Nucleotide with phosphorothioate linkage
  modified_base 7: mod_base = OTHER; note = Nucleotide with phosphorothioate linkage
  modified_base 8: mod_base = OTHER; note = Thymine with phosphorothioate linkage
  modified_base 9: mod_base = OTHER; note = Nucleotide with phosphorothioate linkage
  modified_base 10: mod_base = OTHER; note = Nucleotide with phosphorothioate linkage
  modified_base 11: mod_base = OTHER; note = Nucleotide with phosphorothioate linkage
  modified_base 12: mod_base = OTHER; note = Nucleotide with phosphorothioate linkage
  modified_base 13: mod_base = OTHER; note = 5-methylcytosine with phosphorothioate linkage
  modified_base 14: mod_base = OTHER; note = Nucleotide with phosphorothioate linkage
  modified_base 15: mod_base = OTHER; note = Nucleotide with phosphorothioate linkage
  modified_base 16: mod_base = OTHER; note = 2'-O-methoxyethyl modified nucleotide with phosphorothioate linkage
  modified_base 17: mod_base = OTHER; note = 2'-O-methoxyethyl modified nucleotide with phosphorothioate linkage
  modified_base 18: mod_base = OTHER; note = 2'-O-methoxyethyl modified thymine with phosphorothioate linkage
  modified_base 19: mod_base = OTHER; note = 2'-O-methoxyethyl modified nucleotide with phosphorothioate linkage
  modified_base 20: mod_base = OTHER; note = 2'-O-methoxyethyl 5-methylcytosine with phosphorothioate linkage
  modified_base 21: mod_base = OTHER; note = 2'-O-methoxyethyl modified nucleotide
  misc_feature 1..5: note = RNA
  misc_feature 6..15: note = DNA
  misc_feature 16..21: note = RNA
gcagaggtgaagcgaagtgca

SEQ ID NO: 804 - DNA, 21 bp, synthetic construct
  source 1..21: mol_type = other DNA
  modified_base 1: mod_base = OTHER; note = 2'-O-methoxyethyl modified nucleotide with phosphorothioate linkage
  modified_base 2: mod_base = OTHER; note = 2'-O-methoxyethyl 5-methylcytosine with phosphorothioate linkage
  modified_base 3: mod_base = OTHER; note = 2'-O-methoxyethyl modified nucleotide with phosphorothioate linkage
  modified_base 4: mod_base = OTHER; note = 2'-O-methoxyethyl modified nucleotide with phosphorothioate linkage
  modified_base 5: mod_base = OTHER; note = 2'-O-methoxyethyl modified nucleotide with phosphorothioate linkage
  modified_base 6: mod_base = OTHER; note = 2'-O-methoxyethyl modified nucleotide with phosphorothioate linkage
  modified_base 7: mod_base = OTHER; note = Nucleotide with phosphorothioate linkage
  modified_base 8: mod_base = OTHER; note = Thymine with phosphorothioate linkage
  modified_base 9: mod_base = OTHER; note = Nucleotide with phosphorothioate linkage
  modified_base 10: mod_base = OTHER; note = Nucleotide with phosphorothioate linkage
  modified_base 11: mod_base = OTHER; note = Nucleotide with phosphorothioate linkage
  modified_base 12: mod_base = OTHER; note = Nucleotide with phosphorothioate linkage
  modified_base 13: mod_base = OTHER; note = 5-methylcytosine with phosphorothioate linkage
  modified_base 14: mod_base = OTHER; note = Nucleotide with phosphorothioate linkage
  modified_base 15: mod_base = OTHER; note = Nucleotide with phosphorothioate linkage
  modified_base 16: mod_base = OTHER; note = Nucleotide with phosphorothioate linkage
  modified_base 17: mod_base = OTHER; note = 2'-O-methoxyethyl modified nucleotide with phosphorothioate linkage
  modified_base 18: mod_base = OTHER; note = 2'-O-methoxyethyl modified thymine with phosphorothioate linkage
  modified_base 19: mod_base = OTHER; note = 2'-O-methoxyethyl modified nucleotide with phosphorothioate linkage
  modified_base 20: mod_base = OTHER; note = 2'-O-methoxyethyl 5-methylcytosine with phosphorothioate linkage
  modified_base 21: mod_base = OTHER; note = 2'-O-methoxyethyl modified nucleotide
  misc_feature 1..6: note = RNA
  misc_feature 7..16: note = DNA
  misc_feature 17..21: note = RNA
gcagaggtgaagcgaagtgca

SEQ ID NO: 805 - DNA, 20 bp, synthetic construct
  source 1..20: mol_type = other DNA
  modified_base 1: mod_base = OTHER; note = 2'-O-methoxyethyl 5-methylcytosine with phosphorothioate linkage
  modified_base 2: mod_base = OTHER; note = 2'-O-methoxyethyl modified nucleotide with phosphorothioate linkage
  modified_base 3: mod_base = OTHER; note = 2'-O-methoxyethyl modified nucleotide with phosphorothioate linkage
  modified_base 4: mod_base = OTHER; note = 2'-O-methoxyethyl modified nucleotide with phosphorothioate linkage
  modified_base 5: mod_base = OTHER; note = 2'-O-methoxyethyl modified nucleotide with phosphorothioate linkage
  modified_base 6: mod_base = OTHER; note = Nucleotide with phosphorothioate linkage
  modified_base 7: mod_base = OTHER; note = Thymine with phosphorothioate linkage
  modified_base 8: mod_base = OTHER; note = Nucleotide with phosphorothioate linkage
  modified_base 9: mod_base = OTHER; note = Nucleotide with phosphorothioate linkage
  modified_base 10: mod_base = OTHER; note = Nucleotide with phosphorothioate linkage
  modified_base 11: mod_base = OTHER; note = 8-amino-guanosine with phosphorothioate linkage
  modified_base 12: mod_base = OTHER; note = 5-methylcytosine with phosphorothioate linkage
  modified_base 13: mod_base = OTHER; note = Nucleotide with phosphorothioate linkage
  modified_base 14: mod_base = OTHER; note = Nucleotide with phosphorothioate linkage
  modified_base 15: mod_base = OTHER; note = Nucleotide with phosphorothioate linkage
  modified_base 16: mod_base = OTHER; note = Tert-butylguanidine bridged nucleic acid with phosphorothioate linkage
  modified_base 17: mod_base = OTHER; note = 2'-O-methoxyethyl modified thymine with phosphorothioate linkage
  modified_base 18: mod_base = OTHER; note = Locked nucleic acid with phosphorothioate linkage
  modified_base 19: mod_base = OTHER; note = 2'-O-methoxyethyl 5-methylcytosine with phosphorothioate linkage
  modified_base 20: mod_base = OTHER; note = Locked nucleic acid
  misc_feature 1..5: note = RNA
  misc_feature 6..15: note = DNA
  misc_feature 16..20: note = RNA
cagaggtgaagcgaagtgca

SEQ ID NO: 806 - DNA, 20 bp, synthetic construct
  source 1..20: mol_type = other DNA
  modified_base 1: mod_base = OTHER; note = 2'-O-methoxyethyl 5-methylcytosine with phosphorothioate linkage
  modified_base 2: mod_base = OTHER; note = 2'-O-methoxyethyl modified nucleotide with phosphorothioate linkage
  modified_base 3: mod_base = OTHER; note = 2'-O-methoxyethyl modified nucleotide with phosphorothioate linkage
  modified_base 4: mod_base = OTHER; note = 2'-O-methoxyethyl modified nucleotide with phosphorothioate linkage
  modified_base 5: mod_base = OTHER; note = 2'-O-methoxyethyl modified nucleotide with phosphorothioate linkage
  modified_base 6: mod_base = OTHER; note = Nucleotide with phosphorothioate linkage
  modified_base 7: mod_base = OTHER; note = Thymine with phosphorothioate linkage
  modified_base 8: mod_base = OTHER; note = Nucleotide with phosphorothioate linkage
  modified_base 9: mod_base = OTHER; note = Nucleotide with phosphorothioate linkage
  modified_base 10: mod_base = OTHER; note = Nucleotide with phosphorothioate linkage
  modified_base 11: mod_base = OTHER; note = 8-amino-guanosine with phosphorothioate linkage
  modified_base 12: mod_base = OTHER; note = 5-methylcytosine with phosphorothioate linkage
  modified_base 13: mod_base = OTHER; note = Nucleotide with phosphorothioate linkage
  modified_base 14: mod_base = OTHER; note = Nucleotide with phosphorothioate linkage
  modified_base 15: mod_base = OTHER; note = Nucleotide with phosphorothioate linkage
  modified_base 16: mod_base = OTHER; note = Locked nucleic acid with phosphorothioate linkage
  modified_base 17: mod_base = OTHER; note = 2'-O-methoxyethyl modified thymine with phosphorothioate linkage
  modified_base 18: mod_base = OTHER; note = Tert-butylguanidine bridged nucleic acid with phosphorothioate linkage
  modified_base 19: mod_base = OTHER; note = 2'-O-methoxyethyl 5-methylcytosine with phosphorothioate linkage
  modified_base 20: mod_base = OTHER; note = Locked nucleic acid
  misc_feature 1..5: note = RNA
  misc_feature 6..15: note = DNA
  misc_feature 16..20: note = RNA
cagaggtgaagcgaagtgca

SEQ ID NO: 807 - DNA, 20 bp, synthetic construct
  source 1..20: mol_type = other DNA
  modified_base 1: mod_base = OTHER; note = Locked nucleic acid with phosphorothioate linkage
  modified_base 2: mod_base = OTHER; note = Locked 5-methylcytosine with phosphorothioate linkage
  modified_base 3: mod_base = OTHER; note = 2'-O-methoxyethyl modified nucleotide with phosphorothioate linkage
  modified_base 4: mod_base = OTHER; note = 2'-O-methoxyethyl modified nucleotide with phosphorothioate linkage
  modified_base 5: mod_base = OTHER; note = 2'-O-methoxyethyl modified nucleotide with phosphorothioate linkage
  modified_base 6: mod_base = OTHER; note = 2'-O-methyl modified abasic nucleotide with phosphorothioate linkage
  modified_base 7: mod_base = OTHER; note = Nucleotide with phosphorothioate linkage
  modified_base 8: mod_base = OTHER; note = Thymine with phosphorothioate linkage
  modified_base 9: mod_base = OTHER; note = Nucleotide with phosphorothioate linkage
  modified_base 10: mod_base = OTHER; note = Nucleotide with phosphorothioate linkage
  modified_base 11: mod_base = OTHER; note = Nucleotide with phosphorothioate linkage
  modified_base 12: mod_base = OTHER; note = Nucleotide with phosphorothioate linkage
  modified_base 13: mod_base = OTHER; note = 5-methylcytosine with phosphorothioate linkage
  modified_base 14: mod_base = OTHER; note = Nucleotide with phosphorothioate linkage
  modified_base 15: mod_base = OTHER; note = Nucleotide with phosphorothioate linkage
  modified_base 16: mod_base = OTHER; note = 2'-O-methoxyethyl modified nucleotide with phosphorothioate linkage
  modified_base 17: mod_base = OTHER; note = 2'-O-methoxyethyl modified nucleotide with phosphorothioate linkage
  modified_base 18: mod_base = OTHER; note = 2'-O-methoxyethyl modified thymine with phosphorothioate linkage
  modified_base 19: mod_base = OTHER; note = 2'-O-methoxyethyl modified nucleotide with phosphorothioate linkage
  modified_base 20: mod_base = OTHER; note = 2'-O-methoxyethyl 5-methylcytosine
  misc_feature 1..6: note = RNA
  misc_feature 7..15: note = DNA
  misc_feature 16..20: note = RNA
gcagangtgaagcgaagtgc

SEQ ID NO: 808 - DNA, 20 bp, synthetic construct
  source 1..20: mol_type = other DNA
  modified_base 1: mod_base = OTHER; note = Locked nucleic acid with phosphorothioate linkage
  modified_base 2: mod_base = OTHER; note = 2'-O-methoxyethyl 5-methylcytosine with phosphorothioate linkage
  modified_base 3: mod_base = OTHER; note = Locked nucleic acid with phosphorothioate linkage
  modified_base 4: mod_base = OTHER; note = 2'-O-methoxyethyl modified nucleotide with phosphorothioate linkage
  modified_base 5: mod_base = OTHER; note = 2'-O-methoxyethyl modified nucleotide with phosphorothioate linkage
  modified_base 6: mod_base = OTHER; note = 2'-O-methyl modified abasic nucleotide with phosphorothioate linkage
  modified_base 7: mod_base = OTHER; note = Nucleotide with phosphorothioate linkage
  modified_base 8: mod_base = OTHER; note = Thymine with phosphorothioate linkage
  modified_base 9: mod_base = OTHER; note = Nucleotide with phosphorothioate linkage
  modified_base 10: mod_base = OTHER; note = Nucleotide with phosphorothioate linkage
  modified_base 11: mod_base = OTHER; note = Nucleotide with phosphorothioate linkage
  modified_base 12: mod_base = OTHER; note = Nucleotide with phosphorothioate linkage
  modified_base 13: mod_base = OTHER; note = 5-methylcytosine with phosphorothioate linkage
  modified_base 14: mod_base = OTHER; note = Nucleotide with phosphorothioate linkage
  modified_base 15: mod_base = OTHER; note = Nucleotide with phosphorothioate linkage
  modified_base 16: mod_base = OTHER; note = 2'-O-methoxyethyl modified nucleotide with phosphorothioate linkage
  modified_base 17: mod_base = OTHER; note = 2'-O-methoxyethyl modified nucleotide with phosphorothioate linkage
  modified_base 18: mod_base = OTHER; note = 2'-O-methoxyethyl modified thymine with phosphorothioate linkage
  modified_base 19: mod_base = OTHER; note = 2'-O-methoxyethyl modified nucleotide with phosphorothioate linkage
  modified_base 20: mod_base = OTHER; note = 2'-O-methoxyethyl 5-methylcytosine
  misc_feature 1..6: note = RNA
  misc_feature 7..15: note = DNA
  misc_feature 16..20: note = RNA
gcagangtgaagcgaagtgc

SEQ ID NO: 809 - DNA, 20 bp, synthetic construct
  source 1..20: mol_type = other DNA
  modified_base 1: mod_base = OTHER; note = Locked nucleic acid with phosphorothioate linkage
  modified_base 2: mod_base = OTHER; note = 2'-O-methoxyethyl 5-methylcytosine with phosphorothioate linkage
  modified_base 3: mod_base = OTHER; note = 2'-O-methoxyethyl modified nucleotide with phosphorothioate linkage
  modified_base 4: mod_base = OTHER; note = Locked nucleic acid with phosphorothioate linkage
  modified_base 5: mod_base = OTHER; note = 2'-O-methoxyethyl modified nucleotide with phosphorothioate linkage
  modified_base 6: mod_base = OTHER; note = 2'-O-methyl modified abasic nucleotide with phosphorothioate linkage
  modified_base 7: mod_base = OTHER; note = Nucleotide with phosphorothioate linkage
  modified_base 8: mod_base = OTHER; note = Thymine with phosphorothioate linkage
  modified_base 9: mod_base = OTHER; note = Nucleotide with phosphorothioate linkage
  modified_base 10: mod_base = OTHER; note = Nucleotide with phosphorothioate linkage
  modified_base 11: mod_base = OTHER; note = Nucleotide with phosphorothioate linkage
  modified_base 12: mod_base = OTHER; note = Nucleotide with phosphorothioate linkage
  modified_base 13: mod_base = OTHER; note = 5-methylcytosine with phosphorothioate linkage
  modified_base 14: mod_base = OTHER; note = Nucleotide with phosphorothioate linkage
  modified_base 15: mod_base = OTHER; note = Nucleotide with phosphorothioate linkage
  modified_base 16: mod_base = OTHER; note = 2'-O-methoxyethyl modified nucleotide with phosphorothioate linkage
  modified_base 17: mod_base = OTHER; note = 2'-O-methoxyethyl modified nucleotide with phosphorothioate linkage
  modified_base 18: mod_base = OTHER; note = 2'-O-methoxyethyl modified thymine with phosphorothioate linkage
  modified_base 19: mod_base = OTHER; note = 2'-O-methoxyethyl modified nucleotide with phosphorothioate linkage
  modified_base 20: mod_base = OTHER; note = 2'-O-methoxyethyl 5-methylcytosine
  misc_feature 1..6: note = RNA
  misc_feature 7..15: note = DNA
  misc_feature 16..20: note = RNA
gcagangtgaagcgaagtgc

SEQ ID NO: 810 - DNA, 20 bp, synthetic construct
  source 1..20: mol_type = other DNA
  modified_base 1: mod_base = OTHER; note = Locked nucleic acid with phosphorothioate linkage
  modified_base 2: mod_base = OTHER; note = 2'-O-methoxyethyl 5-methylcytosine with phosphorothioate linkage
  modified_base 3: mod_base = OTHER; note = 2'-O-methoxyethyl modified nucleotide with phosphorothioate linkage
  modified_base 4: mod_base = OTHER; note = 2'-O-methoxyethyl modified nucleotide with phosphorothioate linkage
  modified_base 5: mod_base = OTHER; note = Locked nucleic acid with phosphorothioate linkage
  modified_base 6: mod_base = OTHER; note = 2'-O-methyl modified abasic nucleotide with phosphorothioate linkage
  modified_base 7: mod_base = OTHER; note = Nucleotide with phosphorothioate linkage
  modified_base 8: mod_base = OTHER; note = Thymine with phosphorothioate linkage
  modified_base 9: mod_base = OTHER; note = Nucleotide with phosphorothioate linkage
  modified_base 10: mod_base = OTHER; note = Nucleotide with phosphorothioate linkage
  modified_base 11: mod_base = OTHER; note = Nucleotide with phosphorothioate linkage
  modified_base 12: mod_base = OTHER; note = Nucleotide with phosphorothioate linkage
  modified_base 13: mod_base = OTHER; note = 5-methylcytosine with phosphorothioate linkage
  modified_base 14: mod_base = OTHER; note = Nucleotide with phosphorothioate linkage
  modified_base 15: mod_base = OTHER; note = Nucleotide with phosphorothioate linkage
  modified_base 16: mod_base = OTHER; note = 2'-O-methoxyethyl modified nucleotide with phosphorothioate linkage
  modified_base 17: mod_base = OTHER; note = 2'-O-methoxyethyl modified nucleotide with phosphorothioate linkage
  modified_base 18: mod_base = OTHER; note = 2'-O-methoxyethyl modified thymine with phosphorothioate linkage
  modified_base 19: mod_base = OTHER; note = 2'-O-methoxyethyl modified nucleotide with phosphorothioate linkage
  modified_base 20: mod_base = OTHER; note = 2'-O-methoxyethyl 5-methylcytosine
  misc_feature 1..6: note = RNA
  misc_feature 7..15: note = DNA
  misc_feature 16..20: note = RNA
gcagangtgaagcgaagtgc

SEQ ID NO: 811 - DNA, 20 bp, synthetic construct
  source 1..20: mol_type = other DNA
  modified_base 1: mod_base = OTHER; note = Locked nucleic acid with phosphorothioate linkage
  modified_base 2: mod_base = OTHER; note = 2'-O-methoxyethyl 5-methylcytosine with phosphorothioate linkage
  modified_base 3: mod_base = OTHER; note = 2'-O-methoxyethyl modified nucleotide with phosphorothioate linkage
  modified_base 4: mod_base = OTHER; note = 2'-O-methoxyethyl modified nucleotide with phosphorothioate linkage
  modified_base 5: mod_base = OTHER; note = 2'-O-methoxyethyl modified nucleotide with phosphorothioate linkage
  modified_base 6: mod_base = OTHER; note = 2'-O-methyl modified abasic nucleotide with phosphorothioate linkage
  modified_base 7: mod_base = OTHER; note = Nucleotide with phosphorothioate linkage
  modified_base 8: mod_base = OTHER; note = Thymine with phosphorothioate linkage
  modified_base 9: mod_base = OTHER; note = Nucleotide with phosphorothioate linkage
  modified_base 10: mod_base = OTHER; note = Nucleotide with phosphorothioate linkage
  modified_base 11: mod_base = OTHER; note = Nucleotide with phosphorothioate linkage
  modified_base 12: mod_base = OTHER; note = Nucleotide with phosphorothioate linkage
  modified_base 13: mod_base = OTHER; note = 5-methylcytosine with phosphorothioate linkage
  modified_base 14: mod_base = OTHER; note = Nucleotide with phosphorothioate linkage
  modified_base 15: mod_base = OTHER; note = Nucleotide with phosphorothioate linkage
  modified_base 16: mod_base = OTHER; note = Locked nucleic acid with phosphorothioate linkage
  modified_base 17: mod_base = OTHER; note = 2'-O-methoxyethyl modified nucleotide with phosphorothioate linkage
  modified_base 18: mod_base = OTHER; note = 2'-O-methoxyethyl modified thymine with phosphorothioate linkage
  modified_base 19: mod_base = OTHER; note = 2'-O-methoxyethyl modified nucleotide with phosphorothioate linkage
  modified_base 20: mod_base = OTHER; note = 2'-O-methoxyethyl 5-methylcytosine
  misc_feature 1..6: note = RNA
  misc_feature 7..15: note = DNA
  misc_feature 16..20: note = RNA
gcagangtgaagcgaagtgc

SEQ ID NO: 812 - DNA, 20 bp, synthetic construct
  source 1..20: mol_type = other DNA
  modified_base 1: mod_base = OTHER; note = Locked nucleic acid with phosphorothioate linkage
  modified_base 2: mod_base = OTHER; note = 2'-O-methoxyethyl 5-methylcytosine with phosphorothioate linkage
  modified_base 3: mod_base = OTHER; note = 2'-O-methoxyethyl modified nucleotide with phosphorothioate linkage
  modified_base 4: mod_base = OTHER; note = 2'-O-methoxyethyl modified nucleotide with phosphorothioate linkage
  modified_base 5: mod_base = OTHER; note = 2'-O-methoxyethyl modified nucleotide with phosphorothioate linkage
  modified_base 6: mod_base = OTHER; note = 2'-O-methyl modified abasic nucleotide with phosphorothioate linkage
  modified_base 7: mod_base = OTHER; note = Nucleotide with phosphorothioate linkage
  modified_base 8: mod_base = OTHER; note = Thymine with phosphorothioate linkage
  modified_base 9: mod_base = OTHER; note = Nucleotide with phosphorothioate linkage
  modified_base 10: mod_base = OTHER; note = Nucleotide with phosphorothioate linkage
  modified_base 11: mod_base = OTHER; note = Nucleotide with phosphorothioate linkage
  modified_base 12: mod_base = OTHER; note = Nucleotide with phosphorothioate linkage
  modified_base 13: mod_base = OTHER; note = 5-methylcytosine with phosphorothioate linkage
  modified_base 14: mod_base = OTHER; note = Nucleotide with phosphorothioate linkage
  modified_base 15: mod_base = OTHER; note = Nucleotide with phosphorothioate linkage
  modified_base 16: mod_base = OTHER; note = 2'-O-methoxyethyl modified nucleotide with phosphorothioate linkage
  modified_base 17: mod_base = OTHER; note = Locked nucleic acid with phosphorothioate linkage
  modified_base 18: mod_base = OTHER; note = 2'-O-methoxyethyl modified thymine with phosphorothioate linkage
  modified_base 19: mod_base = OTHER; note = 2'-O-methoxyethyl modified nucleotide with phosphorothioate linkage
  modified_base 20: mod_base = OTHER; note = 2'-O-methoxyethyl 5-methylcytosine
  misc_feature 1..6: note = RNA
  misc_feature 7..15: note = DNA
  misc_feature 16..20: note = RNA
gcagangtgaagcgaagtgc

SEQ ID NO: 813 - DNA, 20 bp, synthetic construct
  source 1..20: mol_type = other DNA
  modified_base 1: mod_base = OTHER; note = Locked nucleic acid with phosphorothioate linkage
  modified_base 2: mod_base = OTHER; note = 2'-O-methoxyethyl 5-methylcytosine with phosphorothioate linkage
  modified_base 3: mod_base = OTHER; note = 2'-O-methoxyethyl modified nucleotide with phosphorothioate linkage
  modified_base 4: mod_base = OTHER; note = 2'-O-methoxyethyl modified nucleotide with phosphorothioate linkage
  modified_base 5: mod_base = OTHER; note = 2'-O-methoxyethyl modified nucleotide with phosphorothioate linkage
  modified_base 6: mod_base = OTHER; note = 2'-O-methyl modified abasic nucleotide with phosphorothioate linkage
  modified_base 7: mod_base = OTHER; note = Nucleotide with phosphorothioate linkage
  modified_base 8: mod_base = OTHER; note = Thymine with phosphorothioate linkage
  modified_base 9: mod_base = OTHER; note = Nucleotide with phosphorothioate linkage
  modified_base 10: mod_base = OTHER; note = Nucleotide with phosphorothioate linkage
  modified_base 11: mod_base = OTHER; note = Nucleotide with phosphorothioate linkage
  modified_base 12: mod_base = OTHER; note = Nucleotide with phosphorothioate linkage
  modified_base 13: mod_base = OTHER; note = 5-methylcytosine with phosphorothioate linkage
  modified_base 14: mod_base = OTHER; note = Nucleotide with phosphorothioate linkage
  modified_base 15: mod_base = OTHER; note = Nucleotide with phosphorothioate linkage
  modified_base 16: mod_base = OTHER; note = 2'-O-methoxyethyl modified nucleotide with phosphorothioate linkage
  modified_base 17: mod_base = OTHER; note = 2'-O-methoxyethyl modified nucleotide with phosphorothioate linkage
  modified_base 18: mod_base = OTHER; note = Locked thymine with phosphorothioate linkage
  modified_base 19: mod_base = OTHER; note = 2'-O-methoxyethyl modified nucleotide with phosphorothioate linkage
  modified_base 20: mod_base = OTHER; note = 2'-O-methoxyethyl 5-methylcytosine
  misc_feature 1..6: note = RNA
  misc_feature 7..15: note = DNA
  misc_feature 16..20: note = RNA
gcagangtgaagcgaagtgc

SEQ ID NO: 814 - DNA, 20 bp, synthetic construct
  source 1..20: mol_type = other DNA
  modified_base 1: mod_base = OTHER; note = Locked nucleic acid with phosphorothioate linkage
  modified_base 2: mod_base = OTHER; note = 2'-O-methoxyethyl 5-methylcytosine with phosphorothioate linkage
  modified_base 3: mod_base = OTHER; note = 2'-O-methoxyethyl modified nucleotide with phosphorothioate linkage
  modified_base 4: mod_base = OTHER; note = 2'-O-methoxyethyl modified nucleotide with phosphorothioate linkage
  modified_base 5: mod_base = OTHER; note = 2'-O-methoxyethyl modified nucleotide with phosphorothioate linkage
  modified_base 6: mod_base = OTHER; note = 2'-O-methyl modified abasic nucleotide with phosphorothioate linkage
  modified_base 7: mod_base = OTHER; note = Nucleotide with phosphorothioate linkage
  modified_base 8: mod_base = OTHER; note = Thymine with phosphorothioate linkage
  modified_base 9: mod_base = OTHER; note = Nucleotide with phosphorothioate linkage
  modified_base 10: mod_base = OTHER; note = Nucleotide with phosphorothioate linkage
  modified_base 11: mod_base = OTHER; note = Nucleotide with phosphorothioate linkage
  modified_base 12: mod_base = OTHER; note = Nucleotide with phosphorothioate linkage
  modified_base 13: mod_base = OTHER; note = 5-methylcytosine with phosphorothioate linkage
  modified_base 14: mod_base = OTHER; note = Nucleotide with phosphorothioate linkage
  modified_base 15: mod_base = OTHER; note = Nucleotide with phosphorothioate linkage
  modified_base 16: mod_base = OTHER; note = 2'-O-methoxyethyl modified nucleotide with phosphorothioate linkage
  modified_base 17: mod_base = OTHER; note = 2'-O-methoxyethyl modified nucleotide with phosphorothioate linkage
  modified_base 18: mod_base = OTHER; note = 2'-O-methoxyethyl modified thymine with phosphorothioate linkage
  modified_base 19: mod_base = OTHER; note = Locked nucleic acid with phosphorothioate linkage
  modified_base 20: mod_base = OTHER; note = 2'-O-methoxyethyl 5-methylcytosine
  misc_feature 1..6: note = RNA
  misc_feature 7..15: note = DNA
  misc_feature 16..20: note = RNA
gcagangtgaagcgaagtgc

SEQ ID NO: 815 - DNA, 20 bp, synthetic construct
  source 1..20: mol_type = other DNA
  modified_base 1: mod_base = OTHER; note = Locked nucleic acid with phosphorothioate linkage
  modified_base 2: mod_base = OTHER; note = 2'-O-methoxyethyl 5-methylcytosine with phosphorothioate linkage
  modified_base 3: mod_base = OTHER; note = 2'-O-methoxyethyl modified nucleotide with phosphorothioate linkage
  modified_base 4: mod_base = OTHER; note = 2'-O-methoxyethyl modified nucleotide with phosphorothioate linkage
  modified_base 5: mod_base = OTHER; note = 2'-O-methoxyethyl modified nucleotide with phosphorothioate linkage
  modified_base 6: mod_base = OTHER; note = 2'-O-methyl modified abasic nucleotide with phosphorothioate linkage
  modified_base 7: mod_base = OTHER; note = Nucleotide with phosphorothioate linkage
  modified_base 8: mod_base = OTHER; note = Thymine with phosphorothioate linkage
  modified_base 9: mod_base = OTHER; note = Nucleotide with phosphorothioate linkage
  modified_base 10: mod_base = OTHER; note = Nucleotide with phosphorothioate linkage
  modified_base 11: mod_base = OTHER; note = Nucleotide with phosphorothioate linkage
  modified_base 12: mod_base = OTHER; note = Nucleotide with phosphorothioate linkage
  modified_base 13: mod_base = OTHER; note = 5-methylcytosine with phosphorothioate linkage
  modified_base 14: mod_base = OTHER; note = Nucleotide with phosphorothioate linkage
  modified_base 15: mod_base = OTHER; note = Nucleotide with phosphorothioate linkage
  modified_base 16: mod_base = OTHER; note = 2'-O-methoxyethyl modified nucleotide with phosphorothioate linkage
  modified_base 17: mod_base = OTHER; note = 2'-O-methoxyethyl modified nucleotide with phosphorothioate linkage
  modified_base 18: mod_base = OTHER; note = 2'-O-methoxyethyl modified thymine with phosphorothioate linkage
  modified_base 19: mod_base = OTHER; note = 2'-O-methoxyethyl modified nucleotide with phosphorothioate linkage
  modified_base 20: mod_base = OTHER; note = Locked 5-methylcytosine
  misc_feature 1..6: note = RNA
  misc_feature 7..15: note = DNA
  misc_feature 16..20: note = RNA
gcagangtgaagcgaagtgc

SEQ ID NO: 816 - DNA, 20 bp, synthetic construct
  source 1..20: mol_type = other DNA
  modified_base 1: mod_base = OTHER; note = 2'-O-methoxyethyl modified nucleotide with phosphorothioate linkage
  modified_base 2: mod_base = OTHER; note = Locked 5-methylcytosine with phosphorothioate linkage
  modified_base 3: mod_base = OTHER; note = Locked nucleic acid with phosphorothioate linkage
  modified_base 4: mod_base = OTHER; note = 2'-O-methoxyethyl modified nucleotide with phosphorothioate linkage
  modified_base 5: mod_base = OTHER; note = 2'-O-methoxyethyl modified nucleotide with phosphorothioate linkage
  modified_base 6: mod_base = OTHER; note = 2'-O-methyl modified abasic nucleotide with phosphorothioate linkage
  modified_base 7: mod_base = OTHER; note = Nucleotide with phosphorothioate linkage
  modified_base 8: mod_base = OTHER; note = Thymine with phosphorothioate linkage
  modified_base 9: mod_base = OTHER; note = Nucleotide with phosphorothioate linkage
  modified_base 10: mod_base = OTHER; note = Nucleotide with phosphorothioate linkage
  modified_base 11: mod_base = OTHER; note = Nucleotide with phosphorothioate linkage
  modified_base 12: mod_base = OTHER; note = Nucleotide with phosphorothioate linkage
  modified_base 13: mod_base = OTHER; note = 5-methylcytosine with phosphorothioate linkage
  modified_base 14: mod_base = OTHER; note = Nucleotide with phosphorothioate linkage
  modified_base 15: mod_base = OTHER; note = Nucleotide with phosphorothioate linkage
  modified_base 16: mod_base = OTHER; note = 2'-O-methoxyethyl modified nucleotide with phosphorothioate linkage
  modified_base 17: mod_base = OTHER; note = 2'-O-methoxyethyl modified nucleotide with phosphorothioate linkage
  modified_base 18: mod_base = OTHER; note = 2'-O-methoxyethyl modified thymine with phosphorothioate linkage
  modified_base 19: mod_base = OTHER; note = 2'-O-methoxyethyl modified nucleotide with phosphorothioate linkage
  modified_base 20: mod_base = OTHER; note = 2'-O-methoxyethyl 5-methylcytosine
  misc_feature 1..6: note = RNA
  misc_feature 7..15: note = DNA
  misc_feature 16..20: note = RNA
gcagangtgaagcgaagtgc

SEQ ID NO: 817 - DNA, 20 bp, synthetic construct
  source 1..20: mol_type = other DNA
  modified_base 1: mod_base = OTHER; note = 2'-O-methoxyethyl modified nucleotide with phosphorothioate linkage
  modified_base 2: mod_base = OTHER; note = Locked 5-methylcytosine with phosphorothioate linkage
  modified_base 3: mod_base = OTHER; note = 2'-O-methoxyethyl modified nucleotide with phosphorothioate linkage
  modified_base 4: mod_base = OTHER; note = Locked nucleic acid with phosphorothioate linkage
  modified_base 5: mod_base = OTHER; note = 2'-O-methoxyethyl modified nucleotide with phosphorothioate linkage
  modified_base 6: mod_base = OTHER; note = 2'-O-methyl modified abasic nucleotide with phosphorothioate linkage
  modified_base 7: mod_base = OTHER; note = Nucleotide with phosphorothioate linkage
  modified_base 8: mod_base = OTHER; note = Thymine with phosphorothioate linkage
  modified_base 9: mod_base = OTHER; note = Nucleotide with phosphorothioate linkage
  modified_base 10: mod_base = OTHER; note = Nucleotide with phosphorothioate linkage
  modified_base 11: mod_base = OTHER; note = Nucleotide with phosphorothioate linkage
  modified_base 12: mod_base = OTHER; note = Nucleotide with phosphorothioate linkage
  modified_base 13: mod_base = OTHER; note = 5-methylcytosine with phosphorothioate linkage
  modified_base 14: mod_base = OTHER; note = Nucleotide with phosphorothioate linkage
  modified_base 15: mod_base = OTHER; note = Nucleotide with phosphorothioate linkage
  modified_base 16: mod_base = OTHER; note = 2'-O-methoxyethyl modified nucleotide with phosphorothioate linkage
  modified_base 17: mod_base = OTHER; note = 2'-O-methoxyethyl modified nucleotide with phosphorothioate linkage
  modified_base 18: mod_base = OTHER; note = 2'-O-methoxyethyl modified thymine with phosphorothioate linkage
  modified_base 19: mod_base = OTHER; note = 2'-O-methoxyethyl modified nucleotide with phosphorothioate linkage
  modified_base 20: mod_base = OTHER; note = 2'-O-methoxyethyl 5-methylcytosine
  misc_feature 1..6: note = RNA
  misc_feature 7..15: note = DNA
  misc_feature 16..20: note = RNA
gcagangtgaagcgaagtgc

SEQ ID NO: 818 - DNA, 20 bp, synthetic construct
  source 1..20: mol_type = other DNA
  modified_base 1: mod_base = OTHER; note = 2'-O-methoxyethyl modified nucleotide with phosphorothioate linkage
  modified_base 2: mod_base = OTHER; note = Locked 5-methylcytosine with phosphorothioate linkage
  modified_base 3: mod_base = OTHER; note = 2'-O-methoxyethyl modified nucleotide with phosphorothioate linkage
  modified_base 4: mod_base = OTHER; note = 2'-O-methoxyethyl modified nucleotide with phosphorothioate linkage
  modified_base 5: mod_base = OTHER; note = Locked nucleic acid with phosphorothioate linkage
  modified_base 6: mod_base = OTHER; note = 2'-O-methyl modified abasic nucleotide with phosphorothioate linkage
  modified_base 7: mod_base = OTHER; note = Nucleotide with phosphorothioate linkage
  modified_base 8: mod_base = OTHER; note = Thymine with phosphorothioate linkage
  modified_base 9: mod_base = OTHER; note = Nucleotide with phosphorothioate linkage
  modified_base 10: mod_base = OTHER; note = Nucleotide with phosphorothioate linkage
  modified_base 11: mod_base = OTHER; note = Nucleotide with phosphorothioate linkage
  modified_base 12: mod_base = OTHER; note = Nucleotide with phosphorothioate linkage
  modified_base 13: mod_base = OTHER; note = 5-methylcytosine with phosphorothioate linkage
  modified_base 14: mod_base = OTHER; note = Nucleotide with phosphorothioate linkage
  modified_base 15: mod_base = OTHER; note = Nucleotide with phosphorothioate linkage
  modified_base 16: mod_base = OTHER; note = 2'-O-methoxyethyl modified nucleotide with phosphorothioate linkage
  modified_base 17: mod_base = OTHER; note = 2'-O-methoxyethyl modified nucleotide with phosphorothioate linkage
  modified_base 18: mod_base = OTHER; note = 2'-O-methoxyethyl modified thymine with phosphorothioate linkage
  modified_base 19: mod_base = OTHER; note = 2'-O-methoxyethyl modified nucleotide with phosphorothioate linkage
  modified_base 20: mod_base = OTHER; note = 2'-O-methoxyethyl 5-methylcytosine
  misc_feature 1..6: note = RNA
  misc_feature 7..15: note = DNA
  misc_feature 16..20: note = RNA
gcagangtgaagcgaagtgc

SEQ ID NO: 819 - DNA, 20 bp, synthetic construct
  source 1..20: mol_type = other DNA
  modified_base 1: mod_base = OTHER; note = 2'-O-methoxyethyl modified nucleotide with phosphorothioate linkage
  modified_base 2: mod_base = OTHER; note = Locked 5-methylcytosine with phosphorothioate linkage
  modified_base 3: mod_base = OTHER; note = 2'-O-methoxyethyl modified nucleotide with phosphorothioate linkage
  modified_base 4: mod_base = OTHER; note = 2'-O-methoxyethyl modified nucleotide with phosphorothioate linkage
  modified_base 5: mod_base = OTHER; note = 2'-O-methoxyethyl modified nucleotide with phosphorothioate linkage
  modified_base 6: mod_base = OTHER; note = 2'-O-methyl modified abasic nucleotide with phosphorothioate linkage
  modified_base 7: mod_base = OTHER; note = Nucleotide with phosphorothioate linkage
  modified_base 8: mod_base = OTHER; note = Thymine with phosphorothioate linkage
  modified_base 9: mod_base = OTHER; note = Nucleotide with phosphorothioate linkage
  modified_base 10: mod_base = OTHER; note = Nucleotide with phosphorothioate linkage
  modified_base 11: mod_base = OTHER; note = Nucleotide with phosphorothioate linkage
  modified_base 12: mod_base = OTHER; note = Nucleotide with phosphorothioate linkage
  modified_base 13: mod_base = OTHER; note = 5-methylcytosine with phosphorothioate linkage
  modified_base 14: mod_base = OTHER; note = Nucleotide with phosphorothioate linkage
  modified_base 15: mod_base = OTHER; note = Nucleotide with phosphorothioate linkage
  modified_base 16: mod_base = OTHER; note = Locked nucleic acid with phosphorothioate linkage
  modified_base 17: mod_base = OTHER; note = 2'-O-methoxyethyl modified nucleotide with phosphorothioate linkage
  modified_base 18: mod_base = OTHER; note = 2'-O-methoxyethyl modified thymine with phosphorothioate linkage
  modified_base 19: mod_base = OTHER; note = 2'-O-methoxyethyl modified nucleotide with phosphorothioate linkage
  modified_base 20: mod_base = OTHER; note = 2'-O-methoxyethyl 5-methylcytosine
  misc_feature 1..6: note = RNA
  misc_feature 7..15: note = DNA
  misc_feature 16..20: note = RNA
gcagangtgaagcgaagtgc

SEQ ID NO: 820 - DNA, 20 bp, synthetic construct
  source 1..20: mol_type = other DNA
  modified_base 1: mod_base = OTHER; note = 2'-O-methoxyethyl modified nucleotide with phosphorothioate linkage
  modified_base 2: mod_base = OTHER; note = Locked 5-methylcytosine with phosphorothioate linkage
  modified_base 3: mod_base = OTHER; note = 2'-O-methoxyethyl modified nucleotide with phosphorothioate linkage
  modified_base 4: mod_base = OTHER; note = 2'-O-methoxyethyl modified nucleotide with phosphorothioate linkage
  modified_base 5: mod_base = OTHER; note = 2'-O-methoxyethyl modified nucleotide with phosphorothioate linkage
  modified_base 6: mod_base = OTHER; note = 2'-O-methyl modified abasic nucleotide with phosphorothioate linkage
  modified_base 7: mod_base = OTHER; note = Nucleotide with phosphorothioate linkage
  modified_base 8: mod_base = OTHER; note = Thymine with phosphorothioate linkage
  modified_base 9: mod_base = OTHER; note = Nucleotide with phosphorothioate linkage
  modified_base 10: mod_base = OTHER; note = Nucleotide with phosphorothioate linkage
  modified_base 11: mod_base = OTHER; note = Nucleotide with phosphorothioate linkage
  modified_base 12: mod_base = OTHER; note = Nucleotide with phosphorothioate linkage
  modified_base 13: mod_base = OTHER; note = 5-methylcytosine with phosphorothioate linkage
  modified_base 14: mod_base = OTHER; note = Nucleotide with phosphorothioate linkage
  modified_base 15: mod_base = OTHER; note = Nucleotide with phosphorothioate linkage
  modified_base 16: mod_base = OTHER; note = 2'-O-methoxyethyl modified nucleotide with phosphorothioate linkage
  modified_base 17: mod_base = OTHER; note = Locked nucleic acid with phosphorothioate linkage
  modified_base 18: mod_base = OTHER; note = 2'-O-methoxyethyl modified thymine with phosphorothioate linkage
  modified_base 19: mod_base = OTHER; note = 2'-O-methoxyethyl modified nucleotide with phosphorothioate linkage
  modified_base 20: mod_base = OTHER; note = 2'-O-methoxyethyl 5-methylcytosine
  misc_feature 1..6: note = RNA
  misc_feature 7..15: note = DNA
  misc_feature 16..20: note = RNA
gcagangtgaagcgaagtgc

SEQ ID NO: 821 - DNA, 20 bp, synthetic construct
  source 1..20: mol_type = other DNA
  modified_base 1: mod_base = OTHER; note = 2'-O-methoxyethyl modified nucleotide with phosphorothioate linkage
  modified_base 2: mod_base = OTHER; note = Locked 5-methylcytosine with phosphorothioate linkage
  modified_base 3: mod_base = OTHER; note = 2'-O-methoxyethyl modified nucleotide with phosphorothioate linkage
  modified_base 4: mod_base = OTHER; note = 2'-O-methoxyethyl modified nucleotide with phosphorothioate linkage
  modified_base 5: mod_base = OTHER; note = 2'-O-methoxyethyl modified nucleotide with phosphorothioate linkage
  modified_base 6: mod_base = OTHER; note = 2'-O-methyl modified abasic nucleotide with phosphorothioate linkage
  modified_base 7: mod_base = OTHER; note = Nucleotide with phosphorothioate linkage
  modified_base 8: mod_base = OTHER; note = Thymine with phosphorothioate linkage
  modified_base 9: mod_base = OTHER; note = Nucleotide with phosphorothioate linkage
  modified_base 10: mod_base = OTHER; note = Nucleotide with phosphorothioate linkage
  modified_base 11: mod_base = OTHER; note = Nucleotide with phosphorothioate linkage
  modified_base 12: mod_base = OTHER; note = Nucleotide with phosphorothioate linkage
  modified_base 13: mod_base = OTHER; note = 5-methylcytosine with phosphorothioate linkage
  modified_base 14: mod_base = OTHER; note = Nucleotide with phosphorothioate linkage
  modified_base 15: mod_base = OTHER; note = Nucleotide with phosphorothioate linkage
  modified_base 16: mod_base = OTHER; note = 2'-O-methoxyethyl modified nucleotide with phosphorothioate linkage
  modified_base 17: mod_base = OTHER; note = 2'-O-methoxyethyl modified nucleotide with phosphorothioate linkage
  modified_base 18: mod_base = OTHER; note = Locked thymine with phosphorothioate linkage
  modified_base 19: mod_base = OTHER; note = 2'-O-methoxyethyl modified nucleotide with phosphorothioate linkage
  modified_base 20: mod_base = OTHER; note = 2'-O-methoxyethyl 5-methylcytosine
  misc_feature 1..6: note = RNA
  misc_feature 7..15: note = DNA
  misc_feature 16..20: note = RNA
gcagangtgaagcgaagtgc

SEQ ID NO: 822 - DNA, 20 bp, synthetic construct
  source 1..20: mol_type = other DNA
  modified_base 1: mod_base = OTHER; note = 2'-O-methoxyethyl modified nucleotide with phosphorothioate linkage
  modified_base 2: mod_base = OTHER; note = Locked 5-methylcytosine with phosphorothioate linkage
  modified_base 3: mod_base = OTHER; note = 2'-O-methoxyethyl modified nucleotide with phosphorothioate linkage
  modified_base 4: mod_base = OTHER; note = 2'-O-methoxyethyl modified nucleotide with phosphorothioate linkage
  modified_base 5: mod_base = OTHER; note = 2'-O-methoxyethyl modified nucleotide with phosphorothioate linkage
  modified_base 6: mod_base = OTHER; note = 2'-O-methyl modified abasic nucleotide with phosphorothioate linkage
  modified_base 7: mod_base = OTHER; note = Nucleotide with phosphorothioate linkage
  modified_base 8: mod_base = OTHER; note = Thymine with phosphorothioate linkage
  modified_base 9: mod_base = OTHER; note = Nucleotide with phosphorothioate linkage
  modified_base 10: mod_base = OTHER; note = Nucleotide with phosphorothioate linkage
  modified_base 11: mod_base = OTHER; note = Nucleotide with phosphorothioate linkage
  modified_base 12: mod_base = OTHER; note = Nucleotide with phosphorothioate linkage
  modified_base 13: mod_base = OTHER; note = 5-methylcytosine with phosphorothioate linkage
  modified_base 14: mod_base = OTHER; note = Nucleotide with phosphorothioate linkage
  modified_base 15: mod_base = OTHER; note = Nucleotide with phosphorothioate linkage
  modified_base 16: mod_base = OTHER; note = 2'-O-methoxyethyl modified nucleotide with phosphorothioate linkage
  modified_base 17: mod_base = OTHER; note = 2'-O-methoxyethyl modified nucleotide with phosphorothioate linkage
  modified_base 18: mod_base = OTHER; note = 2'-O-methoxyethyl modified thymine with phosphorothioate linkage
  modified_base 19: mod_base = OTHER; note = Locked nucleic acid with phosphorothioate linkage
  modified_base 20: mod_base = OTHER; note = 2'-O-methoxyethyl 5-methylcytosine
  misc_feature 1..6: note = RNA
  misc_feature 7..15: note = DNA
  misc_feature 16..20: note = RNA
gcagangtgaagcgaagtgc

SEQ ID NO: 823 - DNA, 20 bp, synthetic construct
  source 1..20: mol_type = other DNA
  modified_base 1: mod_base = OTHER; note = 2'-O-methoxyethyl modified nucleotide with phosphorothioate linkage
  modified_base 2: mod_base = OTHER; note = Locked 5-methylcytosine with phosphorothioate linkage
  modified_base 3: mod_base = OTHER; note = 2'-O-methoxyethyl modified nucleotide with phosphorothioate linkage
  modified_base 4: mod_base = OTHER; note = 2'-O-methoxyethyl modified nucleotide with phosphorothioate linkage
  modified_base 5: mod_base = OTHER; note = 2'-O-methoxyethyl modified nucleotide with phosphorothioate linkage
  modified_base 6: mod_base = OTHER; note = 2'-O-methyl modified abasic nucleotide with phosphorothioate linkage
  modified_base 7: mod_base = OTHER; note = Nucleotide with phosphorothioate linkage
  modified_base 8: mod_base = OTHER; note = Thymine with phosphorothioate linkage
  modified_base 9: mod_base = OTHER; note = Nucleotide with phosphorothioate linkage
  modified_base 10: mod_base = OTHER; note = Nucleotide with phosphorothioate linkage
  modified_base 11: mod_base = OTHER; note = Nucleotide with phosphorothioate linkage
  modified_base 12: mod_base = OTHER; note = Nucleotide with phosphorothioate linkage
  modified_base 13: mod_base = OTHER; note = 5-methylcytosine with phosphorothioate linkage
  modified_base 14: mod_base = OTHER; note = Nucleotide with phosphorothioate linkage
  modified_base 15: mod_base = OTHER; note = Nucleotide with phosphorothioate linkage
  modified_base 16: mod_base = OTHER; note = 2'-O-methoxyethyl modified nucleotide with phosphorothioate linkage
  modified_base 17: mod_base = OTHER; note = 2'-O-methoxyethyl modified nucleotide with phosphorothioate linkage
  modified_base 18: mod_base = OTHER; note = 2'-O-methoxyethyl modified thymine with phosphorothioate linkage
  modified_base 19: mod_base = OTHER; note = 2'-O-methoxyethyl modified nucleotide with phosphorothioate linkage
  modified_base 20: mod_base = OTHER; note = Locked 5-methylcytosine
  misc_feature 1..6: note = RNA
  misc_feature 7..15: note = DNA
  misc_feature 16..20: note = RNA
gcagangtgaagcgaagtgc

SEQ ID NO: 824 - DNA, 20 bp, synthetic construct
  source 1..20: mol_type = other DNA
  modified_base 1: mod_base = OTHER; note = 2'-O-methoxyethyl modified nucleotide with phosphorothioate linkage
  modified_base 2: mod_base = OTHER; note = 2'-O-methoxyethyl 5-methylcytosine with phosphorothioate linkage
  modified_base 3: mod_base = OTHER; note = Locked nucleic acid with phosphorothioate linkage
  modified_base 4: mod_base = OTHER; note = Locked nucleic acid with phosphorothioate linkage
  modified_base 5: mod_base = OTHER; note = 2'-O-methoxyethyl modified nucleotide with phosphorothioate linkage
  modified_base 6: mod_base = OTHER; note = 2'-O-methyl modified abasic nucleotide with phosphorothioate linkage
  modified_base 7: mod_base = OTHER; note = Nucleotide with phosphorothioate linkage
  modified_base 8: mod_base = OTHER; note = Thymine with phosphorothioate linkage
  modified_base 9: mod_base = OTHER; note = Nucleotide with phosphorothioate linkage
  modified_base 10: mod_base = OTHER; note = Nucleotide with phosphorothioate linkage
  modified_base 11: mod_base = OTHER; note = Nucleotide with phosphorothioate linkage
  modified_base 12: mod_base = OTHER; note = Nucleotide with phosphorothioate linkage
  modified_base 13: mod_base = OTHER; note = 5-methylcytosine with phosphorothioate linkage
  modified_base 14: mod_base = OTHER; note = Nucleotide with phosphorothioate linkage
  modified_base 15: mod_base = OTHER; note = Nucleotide with phosphorothioate linkage
  modified_base 16: mod_base = OTHER; note = 2'-O-methoxyethyl modified nucleotide with phosphorothioate linkage
  modified_base 17: mod_base = OTHER; note = 2'-O-methoxyethyl modified nucleotide with phosphorothioate linkage
  modified_base 18: mod_base = OTHER; note = 2'-O-methoxyethyl modified thymine with phosphorothioate linkage
  modified_base 19: mod_base = OTHER; note = 2'-O-methoxyethyl modified nucleotide with phosphorothioate linkage
  modified_base 20: mod_base = OTHER; note = 2'-O-methoxyethyl 5-methylcytosine
  misc_feature 1..6: note = RNA
  misc_feature 7..15: note = DNA
  misc_feature 16..20: note = RNA
gcagangtgaagcgaagtgc

SEQ ID NO: 825 - DNA, 20 bp, synthetic construct
  source 1..20: mol_type = other DNA
  modified_base 1: mod_base = OTHER; note = 2'-O-methoxyethyl modified nucleotide with phosphorothioate linkage
  modified_base 2: mod_base = OTHER; note = 2'-O-methoxyethyl 5-methylcytosine with phosphorothioate linkage
  modified_base 3: mod_base = OTHER; note = Locked nucleic acid with phosphorothioate linkage
  modified_base 4: mod_base = OTHER; note = 2'-O-methoxyethyl modified nucleotide with phosphorothioate linkage
  modified_base 5: mod_base = OTHER; note = Locked nucleic acid with phosphorothioate linkage
  modified_base 6: mod_base = OTHER; note = 2'-O-methyl modified abasic nucleotide with phosphorothioate linkage
  modified_base 7: mod_base = OTHER; note = Nucleotide with phosphorothioate linkage
  modified_base 8: mod_base = OTHER; note = Thymine with phosphorothioate linkage
  modified_base 9: mod_base = OTHER; note = Nucleotide with phosphorothioate linkage
  modified_base 10: mod_base = OTHER; note = Nucleotide with phosphorothioate linkage
  modified_base 11: mod_base = OTHER; note = Nucleotide with phosphorothioate linkage
  modified_base 12: mod_base = OTHER; note = Nucleotide with phosphorothioate linkage
  modified_base 13: mod_base = OTHER; note = 5-methylcytosine with phosphorothioate linkage
  modified_base 14: mod_base = OTHER; note = Nucleotide with phosphorothioate linkage
  modified_base 15: mod_base = OTHER; note = Nucleotide with phosphorothioate linkage
  modified_base 16: mod_base = OTHER; note = 2'-O-methoxyethyl modified nucleotide with phosphorothioate linkage
  modified_base 17: mod_base = OTHER; note = 2'-O-methoxyethyl modified nucleotide with phosphorothioate linkage
  modified_base 18: mod_base = OTHER; note = 2'-O-methoxyethyl modified thymine with phosphorothioate linkage
  modified_base 19: mod_base = OTHER; note = 2'-O-methoxyethyl modified nucleotide with phosphorothioate linkage
  modified_base 20: mod_base = OTHER; note = 2'-O-methoxyethyl 5-methylcytosine
  misc_feature 1..6: note = RNA
  misc_feature 7..15: note = DNA
  misc_feature 16..20: note = RNA
gcagangtgaagcgaagtgc

SEQ ID NO: 826 - DNA, 20 bp, synthetic construct
  source 1..20: mol_type = other DNA
  modified_base 1: mod_base = OTHER; note = 2'-O-methoxyethyl modified nucleotide with phosphorothioate linkage
  modified_base 2: mod_base = OTHER; note = 2'-O-methoxyethyl 5-methylcytosine with phosphorothioate linkage
  modified_base 3: mod_base = OTHER; note = Locked nucleic acid with phosphorothioate linkage
  modified_base 4: mod_base = OTHER; note = 2'-O-methoxyethyl modified nucleotide with phosphorothioate linkage
  modified_base 5: mod_base = OTHER; note = 2'-O-methoxyethyl modified nucleotide with phosphorothioate linkage
  modified_base 6: mod_base = OTHER; note = 2'-O-methyl modified abasic nucleotide with phosphorothioate linkage
  modified_base 7: mod_base = OTHER; note = Nucleotide with phosphorothioate linkage
  modified_base 8: mod_base = OTHER; note = Thymine with phosphorothioate linkage
  modified_base 9: mod_base = OTHER; note = Nucleotide with phosphorothioate linkage
  modified_base 10: mod_base = OTHER; note = Nucleotide with phosphorothioate linkage
  modified_base 11: mod_base = OTHER; note = Nucleotide with phosphorothioate linkage
  modified_base 12: mod_base = OTHER; note = Nucleotide with phosphorothioate linkage
  modified_base 13: mod_base = OTHER; note = 5-methylcytosine with phosphorothioate linkage
  modified_base 14: mod_base = OTHER; note = Nucleotide with phosphorothioate linkage
  modified_base 15: mod_base = OTHER; note = Nucleotide with phosphorothioate linkage
  modified_base 16: mod_base = OTHER; note = Locked nucleic acid with phosphorothioate linkage
  modified_base 17: mod_base = OTHER; note = 2'-O-methoxyethyl modified nucleotide with phosphorothioate linkage
  modified_base 18: mod_base = OTHER; note = 2'-O-methoxyethyl modified thymine with phosphorothioate linkage
  modified_base 19: mod_base = OTHER; note = 2'-O-methoxyethyl modified nucleotide with phosphorothioate linkage
  modified_base 20: mod_base = OTHER; note = 2'-O-methoxyethyl 5-methylcytosine
  misc_feature 1..6: note = RNA
  misc_feature 7..15: note = DNA
  misc_feature 16..20: note = RNA
gcagangtgaagcgaagtgc

SEQ ID NO: 827 - DNA, 20 bp, synthetic construct
  source 1..20: mol_type = other DNA
  modified_base 1: mod_base = OTHER; note = 2'-O-methoxyethyl modified nucleotide with phosphorothioate linkage
  modified_base 2: mod_base = OTHER; note = 2'-O-methoxyethyl 5-methylcytosine with phosphorothioate linkage
  modified_base 3: mod_base = OTHER; note = Locked nucleic acid with phosphorothioate linkage
  modified_base 4: mod_base = OTHER; note = 2'-O-methoxyethyl modified nucleotide with phosphorothioate linkage
  modified_base 5: mod_base = OTHER; note = 2'-O-methoxyethyl modified nucleotide with phosphorothioate linkage
  modified_base 6: mod_base = OTHER; note = 2'-O-methyl modified abasic nucleotide with phosphorothioate linkage
  modified_base 7: mod_base = OTHER; note = Nucleotide with phosphorothioate linkage
  modified_base 8: mod_base = OTHER; note = Thymine with phosphorothioate linkage
  modified_base 9: mod_base = OTHER; note = Nucleotide with phosphorothioate linkage
  modified_base 10: mod_base = OTHER; note = Nucleotide with phosphorothioate linkage
  modified_base 11: mod_base = OTHER; note = Nucleotide with phosphorothioate linkage
  modified_base 12: mod_base = OTHER; note = Nucleotide with phosphorothioate linkage
  modified_base 13: mod_base = OTHER; note = 5-methylcytosine with phosphorothioate linkage
  modified_base 14: mod_base = OTHER; note = Nucleotide with phosphorothioate linkage
  modified_base 15: mod_base = OTHER; note = Nucleotide with phosphorothioate linkage
  modified_base 16: mod_base = OTHER; note = 2'-O-methoxyethyl modified nucleotide with phosphorothioate linkage
  modified_base 17: mod_base = OTHER; note = Locked nucleic acid with phosphorothioate linkage
  modified_base 18: mod_base = OTHER; note = 2'-O-methoxyethyl modified thymine with phosphorothioate linkage
  modified_base 19: mod_base = OTHER; note = 2'-O-methoxyethyl modified nucleotide with phosphorothioate linkage
  modified_base 20: mod_base = OTHER; note = 2'-O-methoxyethyl 5-methylcytosine
  misc_feature 1..6: note = RNA
  misc_feature 7..15: note = DNA
  misc_feature 16..20: note = RNA
gcagangtgaagcgaagtgc

SEQ ID NO: 828 - DNA, 20 bp, synthetic construct
  source 1..20: mol_type = other DNA
  modified_base 1: mod_base = OTHER; note = 2'-O-methoxyethyl modified nucleotide with phosphorothioate linkage
  modified_base 2: mod_base = OTHER; note = 2'-O-methoxyethyl 5-methylcytosine with phosphorothioate linkage
  modified_base 3: mod_base = OTHER; note = Locked nucleic acid with phosphorothioate linkage
  modified_base 4: mod_base = OTHER; note = 2'-O-methoxyethyl modified nucleotide with phosphorothioate linkage
  modified_base 5: mod_base = OTHER; note = 2'-O-methoxyethyl modified nucleotide with phosphorothioate linkage
  modified_base 6: mod_base = OTHER; note = 2'-O-methyl modified abasic nucleotide with phosphorothioate linkage
  modified_base 7: mod_base = OTHER; note = Nucleotide with phosphorothioate linkage
  modified_base 8: mod_base = OTHER; note = Thymine with phosphorothioate linkage
  modified_base 9: mod_base = OTHER; note = Nucleotide with phosphorothioate linkage
  modified_base 10: mod_base = OTHER; note = Nucleotide with phosphorothioate linkage
  modified_base 11: mod_base = OTHER; note = Nucleotide with phosphorothioate linkage
  modified_base 12: mod_base = OTHER; note = Nucleotide with phosphorothioate linkage
  modified_base 13: mod_base = OTHER; note = 5-methylcytosine with phosphorothioate linkage
  modified_base 14: mod_base = OTHER; note = Nucleotide with phosphorothioate linkage
  modified_base 15: mod_base = OTHER; note = Nucleotide with phosphorothioate linkage
  modified_base 16: mod_base = OTHER; note = 2'-O-methoxyethyl modified nucleotide with phosphorothioate linkage
  modified_base 17: mod_base = OTHER; note = 2'-O-methoxyethyl modified nucleotide with phosphorothioate linkage
  modified_base 18: mod_base = OTHER; note = Locked thymine with phosphorothioate linkage
  modified_base 19: mod_base = OTHER; note = 2'-O-methoxyethyl modified nucleotide with phosphorothioate linkage
  modified_base 20: mod_base = OTHER; note = 2'-O-methoxyethyl 5-methylcytosine
  misc_feature 1..6: note = RNA
  misc_feature 7..15: note = DNA
  misc_feature 16..20: note = RNA
gcagangtgaagcgaagtgc

SEQ ID NO: 829 - DNA, 20 bp, synthetic construct
  source 1..20: mol_type = other DNA
  modified_base 1: mod_base = OTHER; note = 2'-O-methoxyethyl modified nucleotide with phosphorothioate linkage
  modified_base 2: mod_base = OTHER; note = 2'-O-methoxyethyl 5-methylcytosine with phosphorothioate linkage
  modified_base 3: mod_base = OTHER; note = Locked nucleic acid with phosphorothioate linkage
  modified_base 4: mod_base = OTHER; note = 2'-O-methoxyethyl modified nucleotide with phosphorothioate linkage
  modified_base 5: mod_base = OTHER; note = 2'-O-methoxyethyl modified nucleotide with phosphorothioate linkage
  modified_base 6: mod_base = OTHER; note = 2'-O-methyl modified abasic nucleotide with phosphorothioate linkage
  modified_base 7: mod_base = OTHER; note = Nucleotide with phosphorothioate linkage
  modified_base 8: mod_base = OTHER; note = Thymine with phosphorothioate linkage
  modified_base 9: mod_base = OTHER; note = Nucleotide with phosphorothioate linkage
  modified_base 10: mod_base = OTHER; note = Nucleotide with phosphorothioate linkage
  modified_base 11: mod_base = OTHER; note = Nucleotide with phosphorothioate linkage
  modified_base 12: mod_base = OTHER; note = Nucleotide with phosphorothioate linkage
  modified_base 13: mod_base = OTHER; note = 5-methylcytosine with phosphorothioate linkage
  modified_base 14: mod_base = OTHER; note = Nucleotide with phosphorothioate linkage
  modified_base 15: mod_base = OTHER; note = Nucleotide with phosphorothioate linkage
  modified_base 16: mod_base = OTHER; note = 2'-O-methoxyethyl modified nucleotide with phosphorothioate linkage
  modified_base 17: mod_base = OTHER; note = 2'-O-methoxyethyl modified nucleotide with phosphorothioate linkage
  modified_base 18: mod_base = OTHER; note = 2'-O-methoxyethyl modified thymine with phosphorothioate linkage
  modified_base 19: mod_base = OTHER; note = Locked nucleic acid with phosphorothioate linkage
  modified_base 20: mod_base = OTHER; note = 2'-O-methoxyethyl 5-methylcytosine
  misc_feature 1..6: note = RNA
  misc_feature 7..15: note = DNA
  misc_feature 16..20: note = RNA
gcagangtgaagcgaagtgc

SEQ ID NO: 830 - DNA, 20 bp, synthetic construct
  source 1..20: mol_type = other DNA
  modified_base 1: mod_base = OTHER; note = 2'-O-methoxyethyl modified nucleotide with phosphorothioate linkage
  modified_base 2: mod_base = OTHER; note = 2'-O-methoxyethyl 5-methylcytosine with phosphorothioate linkage
  modified_base 3: mod_base = OTHER; note = Locked nucleic acid with phosphorothioate linkage
  modified_base 4: mod_base = OTHER; note = 2'-O-methoxyethyl modified nucleotide with phosphorothioate linkage
  modified_base 5: mod_base = OTHER; note = 2'-O-methoxyethyl modified nucleotide with phosphorothioate linkage
  modified_base 6: mod_base = OTHER; note = 2'-O-methyl modified abasic nucleotide with phosphorothioate linkage
  modified_base 7: mod_base = OTHER; note = Nucleotide with phosphorothioate linkage
  modified_base 8: mod_base = OTHER; note = Thymine with phosphorothioate linkage
  modified_base 9: mod_base = OTHER; note = Nucleotide with phosphorothioate linkage
  modified_base 10: mod_base = OTHER; note = Nucleotide with phosphorothioate linkage
  modified_base 11: mod_base = OTHER; note = Nucleotide with phosphorothioate linkage
  modified_base 12: mod_base = OTHER; note = Nucleotide with phosphorothioate linkage
  modified_base 13: mod_base = OTHER; note = 5-methylcytosine with phosphorothioate linkage
  modified_base 14: mod_base = OTHER; note = Nucleotide with phosphorothioate linkage
  modified_base 15: mod_base = OTHER; note = Nucleotide with phosphorothioate linkage
  modified_base 16: mod_base = OTHER; note = 2'-O-methoxyethyl modified nucleotide with phosphorothioate linkage
  modified_base 17: mod_base = OTHER; note = 2'-O-methoxyethyl modified nucleotide with phosphorothioate linkage
  modified_base 18: mod_base = OTHER; note = 2'-O-methoxyethyl modified thymine with phosphorothioate linkage
  modified_base 19: mod_base = OTHER; note = 2'-O-methoxyethyl modified nucleotide with phosphorothioate linkage
  modified_base 20: mod_base = OTHER; note = Locked 5-methylcytosine
  misc_feature 1..6: note = RNA
  misc_feature 7..15: note = DNA
  misc_feature 16..20: note = RNA
gcagangtgaagcgaagtgc

SEQ ID NO: 831 - DNA, 20 bp, synthetic construct
  source 1..20: mol_type = other DNA
  modified_base 1: mod_base = OTHER; note = 2'-O-methoxyethyl modified nucleotide with phosphorothioate linkage
  modified_base 2: mod_base = OTHER; note = 2'-O-methoxyethyl 5-methylcytosine with phosphorothioate linkage
  modified_base 3: mod_base = OTHER; note = 2'-O-methoxyethyl modified nucleotide with phosphorothioate linkage
  modified_base 4: mod_base = OTHER; note = Locked nucleic acid with phosphorothioate linkage
  modified_base 5: mod_base = OTHER; note = Locked nucleic acid with phosphorothioate linkage
  modified_base 6: mod_base = OTHER; note = 2'-O-methyl modified abasic nucleotide with phosphorothioate linkage
  modified_base 7: mod_base = OTHER; note = Nucleotide with phosphorothioate linkage
  modified_base 8: mod_base = OTHER; note = Thymine with phosphorothioate linkage
  modified_base 9: mod_base = OTHER; note = Nucleotide with phosphorothioate linkage
  modified_base 10: mod_base = OTHER; note = Nucleotide with phosphorothioate linkage
  modified_base 11: mod_base = OTHER; note = Nucleotide with phosphorothioate linkage
  modified_base 12: mod_base = OTHER; note = Nucleotide with phosphorothioate linkage
  modified_base 13: mod_base = OTHER; note = 5-methylcytosine with phosphorothioate linkage
  modified_base 14: mod_base = OTHER; note = Nucleotide with phosphorothioate linkage
  modified_base 15: mod_base = OTHER; note = Nucleotide with phosphorothioate linkage
  modified_base 16: mod_base = OTHER; note = 2'-O-methoxyethyl modified nucleotide with phosphorothioate linkage
  modified_base 17: mod_base = OTHER; note = 2'-O-methoxyethyl modified nucleotide with phosphorothioate linkage
  modified_base 18: mod_base = OTHER; note = 2'-O-methoxyethyl modified thymine with phosphorothioate linkage
  modified_base 19: mod_base = OTHER; note = 2'-O-methoxyethyl modified nucleotide with phosphorothioate linkage
  modified_base 20: mod_base = OTHER; note = 2'-O-methoxyethyl 5-methylcytosine
  misc_feature 1..6: note = RNA
  misc_feature 7..15: note = DNA
  misc_feature 16..20: note = RNA
gcagangtgaagcgaagtgc

SEQ ID NO: 832 - DNA, 20 bp, synthetic construct
  source 1..20: mol_type = other DNA
  modified_base 1: mod_base = OTHER; note = 2'-O-methoxyethyl modified nucleotide with phosphorothioate linkage
  modified_base 2: mod_base = OTHER; note = 2'-O-methoxyethyl 5-methylcytosine with phosphorothioate linkage
  modified_base 3: mod_base = OTHER; note = 2'-O-methoxyethyl modified nucleotide with phosphorothioate linkage
  modified_base 4: mod_base = OTHER; note = Locked nucleic acid with phosphorothioate linkage
  modified_base 5: mod_base = OTHER; note = 2'-O-methoxyethyl modified nucleotide with phosphorothioate linkage
  modified_base 6: mod_base = OTHER; note = 2'-O-methyl modified abasic nucleotide with phosphorothioate linkage
  modified_base 7: mod_base = OTHER; note = Nucleotide with phosphorothioate linkage
  modified_base 8: mod_base = OTHER; note = Thymine with phosphorothioate linkage
  modified_base 9: mod_base = OTHER; note = Nucleotide with phosphorothioate linkage
  modified_base 10: mod_base = OTHER; note = Nucleotide with phosphorothioate linkage
  modified_base 11: mod_base = OTHER; note = Nucleotide with phosphorothioate linkage
  modified_base 12: mod_base = OTHER; note = Nucleotide with phosphorothioate linkage
  modified_base 13: mod_base = OTHER; note = 5-methylcytosine with phosphorothioate linkage
  modified_base 14: mod_base = OTHER; note = Nucleotide with phosphorothioate linkage
  modified_base 15: mod_base = OTHER; note = Nucleotide with phosphorothioate linkage
  modified_base 16: mod_base = OTHER; note = Locked nucleic acid with phosphorothioate linkage
  modified_base 17: mod_base = OTHER; note = 2'-O-methoxyethyl modified nucleotide with phosphorothioate linkage
  modified_base 18: mod_base = OTHER; note = 2'-O-methoxyethyl modified thymine with phosphorothioate linkage
  modified_base 19: mod_base = OTHER; note = 2'-O-methoxyethyl modified nucleotide with phosphorothioate linkage
  modified_base 20: mod_base = OTHER; note = 2'-O-methoxyethyl 5-methylcytosine
  misc_feature 1..6: note = RNA
  misc_feature 7..15: note = DNA
  misc_feature 16..20: note = RNA
gcagangtgaagcgaagtgc

SEQ ID NO: 833 - DNA, 20 bp, synthetic construct
  source 1..20: mol_type = other DNA
  modified_base 1: mod_base = OTHER; note = 2'-O-methoxyethyl modified nucleotide with phosphorothioate linkage
  modified_base 2: mod_base = OTHER; note = 2'-O-methoxyethyl 5-methylcytosine with phosphorothioate linkage
  modified_base 3: mod_base = OTHER; note = 2'-O-methoxyethyl modified nucleotide with phosphorothioate linkage
  modified_base 4: mod_base = OTHER; note = Locked nucleic acid with phosphorothioate linkage
  modified_base 5: mod_base = OTHER; note = 2'-O-methoxyethyl modified nucleotide with phosphorothioate linkage
  modified_base 6: mod_base = OTHER; note = 2'-O-methyl modified abasic nucleotide with phosphorothioate linkage
  modified_base 7: mod_base = OTHER; note = Nucleotide with phosphorothioate linkage
  modified_base 8: mod_base = OTHER; note = Thymine with phosphorothioate linkage
  modified_base 9: mod_base = OTHER; note = Nucleotide with phosphorothioate linkage
  modified_base 10: mod_base = OTHER; note = Nucleotide with phosphorothioate linkage
  modified_base 11: mod_base = OTHER; note = Nucleotide with phosphorothioate linkage
  modified_base 12: mod_base = OTHER; note = Nucleotide with phosphorothioate linkage
  modified_base 13: mod_base = OTHER; note = 5-methylcytosine with phosphorothioate linkage
  modified_base 14: mod_base = OTHER; note = Nucleotide with phosphorothioate linkage
  modified_base 15: mod_base = OTHER; note = Nucleotide with phosphorothioate linkage
  modified_base 16: mod_base = OTHER; note = 2'-O-methoxyethyl modified nucleotide with phosphorothioate linkage
  modified_base 17: mod_base = OTHER; note = Locked nucleic acid with phosphorothioate linkage
  modified_base 18: mod_base = OTHER; note = 2'-O-methoxyethyl modified thymine with phosphorothioate linkage
  modified_base 19: mod_base = OTHER; note = 2'-O-methoxyethyl modified nucleotide with phosphorothioate linkage
  modified_base 20: mod_base = OTHER; note = 2'-O-methoxyethyl 5-methylcytosine
  misc_feature 1..6: note = RNA
  misc_feature 7..15: note = DNA
  misc_feature 16..20: note = RNA
gcagangtgaagcgaagtgc

SEQ ID NO: 834 - DNA, 20 bp, synthetic construct
  source 1..20: mol_type = other DNA
  modified_base 1: mod_base = OTHER; note = 2'-O-methoxyethyl modified nucleotide with phosphorothioate linkage
  modified_base 2: mod_base = OTHER; note = 2'-O-methoxyethyl 5-methylcytosine with phosphorothioate linkage
  modified_base 3: mod_base = OTHER; note = 2'-O-methoxyethyl modified nucleotide with phosphorothioate linkage
  modified_base 4: mod_base = OTHER; note = Locked nucleic acid with phosphorothioate linkage
  modified_base 5: mod_base = OTHER; note = 2'-O-methoxyethyl modified nucleotide with phosphorothioate linkage
  modified_base 6: mod_base = OTHER; note = 2'-O-methyl modified abasic nucleotide with phosphorothioate linkage
  modified_base 7: mod_base = OTHER; note = Nucleotide with phosphorothioate linkage
  modified_base 8: mod_base = OTHER; note = Thymine with phosphorothioate linkage
  modified_base 9: mod_base = OTHER; note = Nucleotide with phosphorothioate linkage
  modified_base 10: mod_base = OTHER; note = Nucleotide with phosphorothioate linkage
  modified_base 11: mod_base = OTHER; note = Nucleotide with phosphorothioate linkage
  modified_base 12: mod_base = OTHER; note = Nucleotide with phosphorothioate linkage
  modified_base 13: mod_base = OTHER; note = 5-methylcytosine with phosphorothioate linkage
  modified_base 14: mod_base = OTHER; note = Nucleotide with phosphorothioate linkage
  modified_base 15: mod_base = OTHER; note = Nucleotide with phosphorothioate linkage
  modified_base 16: mod_base = OTHER; note = 2'-O-methoxyethyl modified nucleotide with phosphorothioate linkage
  modified_base 17: mod_base = OTHER; note = 2'-O-methoxyethyl modified nucleotide with phosphorothioate linkage
  modified_base 18: mod_base = OTHER; note = Locked thymine with phosphorothioate linkage
  modified_base 19: mod_base = OTHER; note = 2'-O-methoxyethyl modified nucleotide with phosphorothioate linkage
  modified_base 20: mod_base = OTHER; note = 2'-O-methoxyethyl 5-methylcytosine
  misc_feature 1..6: note = RNA
  misc_feature 7..15: note = DNA
  misc_feature 16..20: note = RNA
gcagangtgaagcgaagtgc

SEQ ID NO: 835 - DNA, 20 bp, synthetic construct
  source 1..20: mol_type = other DNA
  modified_base 1: mod_base = OTHER; note = 2'-O-methoxyethyl modified nucleotide with phosphorothioate linkage
  modified_base 2: mod_base = OTHER; note = 2'-O-methoxyethyl 5-methylcytosine with phosphorothioate linkage
  modified_base 3: mod_base = OTHER; note = 2'-O-methoxyethyl modified nucleotide with phosphorothioate linkage
  modified_base 4: mod_base = OTHER; note = Locked nucleic acid with phosphorothioate linkage
  modified_base 5: mod_base = OTHER; note = 2'-O-methoxyethyl modified nucleotide with phosphorothioate linkage
  modified_base 6: mod_base = OTHER; note = 2'-O-methyl modified abasic nucleotide with phosphorothioate linkage
  modified_base 7: mod_base = OTHER; note = Nucleotide with phosphorothioate linkage
  modified_base 8: mod_base = OTHER; note = Thymine with phosphorothioate linkage
  modified_base 9: mod_base = OTHER; note = Nucleotide with phosphorothioate linkage
  modified_base 10: mod_base = OTHER; note = Nucleotide with phosphorothioate linkage
  modified_base 11: mod_base = OTHER; note = Nucleotide with phosphorothioate linkage
  modified_base 12: mod_base = OTHER; note = Nucleotide with phosphorothioate linkage
  modified_base 13: mod_base = OTHER; note = 5-methylcytosine with phosphorothioate linkage
  modified_base 14: mod_base = OTHER; note = Nucleotide with phosphorothioate linkage
  modified_base 15: mod_base = OTHER; note = Nucleotide with phosphorothioate linkage
  modified_base 16: mod_base = OTHER; note = 2'-O-methoxyethyl modified nucleotide with phosphorothioate linkage
  modified_base 17: mod_base = OTHER; note = 2'-O-methoxyethyl modified nucleotide with phosphorothioate linkage
  modified_base 18: mod_base = OTHER; note = 2'-O-methoxyethyl modified thymine with phosphorothioate linkage
  modified_base 19: mod_base = OTHER; note = Locked nucleic acid with phosphorothioate linkage
  modified_base 20: mod_base = OTHER; note = 2'-O-methoxyethyl 5-methylcytosine
  misc_feature 1..6: note = RNA
  misc_feature 7..15: note = DNA
  misc_feature 16..20: note = RNA
gcagangtgaagcgaagtgc

SEQ ID NO: 836 - DNA, 20 bp, synthetic construct
  source 1..20: mol_type = other DNA
  modified_base 1: mod_base = OTHER; note = 2'-O-methoxyethyl modified nucleotide with phosphorothioate linkage
  modified_base 2: mod_base = OTHER; note = 2'-O-methoxyethyl 5-methylcytosine with phosphorothioate linkage
  modified_base 3: mod_base = OTHER; note = 2'-O-methoxyethyl modified nucleotide with phosphorothioate linkage
  modified_base 4: mod_base = OTHER; note = Locked nucleic acid with phosphorothioate linkage
  modified_base 5: mod_base = OTHER; note = 2'-O-methoxyethyl modified nucleotide with phosphorothioate linkage
  modified_base 6: mod_base = OTHER; note = 2'-O-methyl modified abasic nucleotide with phosphorothioate linkage
  modified_base 7: mod_base = OTHER; note = Nucleotide with phosphorothioate linkage
  modified_base 8: mod_base = OTHER; note = Thymine with phosphorothioate linkage
  modified_base 9: mod_base = OTHER; note = Nucleotide with phosphorothioate linkage
  modified_base 10: mod_base = OTHER; note = Nucleotide with phosphorothioate linkage
  modified_base 11: mod_base = OTHER; note = Nucleotide with phosphorothioate linkage
  modified_base 12: mod_base = OTHER; note = Nucleotide with phosphorothioate linkage
  modified_base 13: mod_base = OTHER; note = 5-methylcytosine with phosphorothioate linkage
  modified_base 14: mod_base = OTHER; note = Nucleotide with phosphorothioate linkage
  modified_base 15: mod_base = OTHER; note = Nucleotide with phosphorothioate linkage
  modified_base 16: mod_base = OTHER; note = 2'-O-methoxyethyl modified nucleotide with phosphorothioate linkage
  modified_base 17: mod_base = OTHER; note = 2'-O-methoxyethyl modified nucleotide with phosphorothioate linkage
  modified_base 18: mod_base = OTHER; note = 2'-O-methoxyethyl modified thymine with phosphorothioate linkage
  modified_base 19: mod_base = OTHER; note = 2'-O-methoxyethyl modified nucleotide with phosphorothioate linkage
  modified_base 20: mod_base = OTHER; note = Locked 5-methylcytosine
  misc_feature 1..6: note = RNA
  misc_feature 7..15: note = DNA
  misc_feature 16..20: note = RNA
gcagangtgaagcgaagtgc

SEQ ID NO: 837 - DNA, 20 bp, synthetic construct
  source 1..20: mol_type = other DNA
  modified_base 1: mod_base = OTHER; note = 2'-O-methoxyethyl modified nucleotide with phosphorothioate linkage
  modified_base 2: mod_base = OTHER; note = 2'-O-methoxyethyl 5-methylcytosine with phosphorothioate linkage
  modified_base 3: mod_base = OTHER; note = 2'-O-methoxyethyl modified nucleotide with phosphorothioate linkage
  modified_base 4: mod_base = OTHER; note = 2'-O-methoxyethyl modified nucleotide with phosphorothioate linkage
  modified_base 5: mod_base = OTHER; note = Locked nucleic acid with phosphorothioate linkage
  modified_base 6: mod_base = OTHER; note = 2'-O-methyl modified abasic nucleotide with phosphorothioate linkage
  modified_base 7: mod_base = OTHER; note = Nucleotide with phosphorothioate linkage
  modified_base 8: mod_base = OTHER; note = Thymine with phosphorothioate linkage
  modified_base 9: mod_base = OTHER; note = Nucleotide with phosphorothioate linkage
  modified_base 10: mod_base = OTHER; note = Nucleotide with phosphorothioate linkage
  modified_base 11: mod_base = OTHER; note = Nucleotide with phosphorothioate linkage
  modified_base 12: mod_base = OTHER; note = Nucleotide with phosphorothioate linkage
  modified_base 13: mod_base = OTHER; note = 5-methylcytosine with phosphorothioate linkage
  modified_base 14: mod_base = OTHER; note = Nucleotide with phosphorothioate linkage
  modified_base 15: mod_base = OTHER; note = Nucleotide with phosphorothioate linkage
  modified_base 16: mod_base = OTHER; note = Locked nucleic acid with phosphorothioate linkage
  modified_base 17: mod_base = OTHER; note = 2'-O-methoxyethyl modified nucleotide with phosphorothioate linkage
  modified_base 18: mod_base = OTHER; note = 2'-O-methoxyethyl modified thymine with phosphorothioate linkage
  modified_base 19: mod_base = OTHER; note = 2'-O-methoxyethyl modified nucleotide with phosphorothioate linkage
  modified_base 20: mod_base = OTHER; note = 2'-O-methoxyethyl 5-methylcytosine
  misc_feature 1..6: note = RNA
  misc_feature 7..15: note = DNA
  misc_feature 16..20: note = RNA
gcagangtgaagcgaagtgc

SEQ ID NO: 838 - DNA, 20 bp, synthetic construct
  source 1..20: mol_type = other DNA
  modified_base 1: mod_base = OTHER; note = 2'-O-methoxyethyl modified nucleotide with phosphorothioate linkage
  modified_base 2: mod_base = OTHER; note = 2'-O-methoxyethyl 5-methylcytosine with phosphorothioate linkage
  modified_base 3: mod_base = OTHER; note = 2'-O-methoxyethyl modified nucleotide with phosphorothioate linkage
  modified_base 4: mod_base = OTHER; note = 2'-O-methoxyethyl modified nucleotide with phosphorothioate linkage
  modified_base 5: mod_base = OTHER; note = Locked nucleic acid with phosphorothioate linkage
  modified_base 6: mod_base = OTHER; note = 2'-O-methyl modified abasic nucleotide with phosphorothioate linkage
  modified_base 7: mod_base = OTHER; note = Nucleotide with phosphorothioate linkage
  modified_base 8: mod_base = OTHER; note = Thymine with phosphorothioate linkage
  modified_base 9: mod_base = OTHER; note = Nucleotide with phosphorothioate linkage
  modified_base 10: mod_base = OTHER; note = Nucleotide with phosphorothioate linkage
  modified_base 11: mod_base = OTHER; note = Nucleotide with phosphorothioate linkage
  modified_base 12: mod_base = OTHER; note = Nucleotide with phosphorothioate linkage
  modified_base 13: mod_base = OTHER; note = 5-methylcytosine with phosphorothioate linkage
  modified_base 14: mod_base = OTHER; note = Nucleotide with phosphorothioate linkage
  modified_base 15: mod_base = OTHER; note = Nucleotide with phosphorothioate linkage
  modified_base 16: mod_base = OTHER; note = 2'-O-methoxyethyl modified nucleotide with phosphorothioate linkage
  modified_base 17: mod_base = OTHER; note = Locked nucleic acid with phosphorothioate linkage
  modified_base 18: mod_base = OTHER; note = 2'-O-methoxyethyl modified thymine with phosphorothioate linkage
  modified_base 19: mod_base = OTHER; note = 2'-O-methoxyethyl modified nucleotide with phosphorothioate linkage
  modified_base 20: mod_base = OTHER; note = 2'-O-methoxyethyl 5-methylcytosine
  misc_feature 1..6: note = RNA
  misc_feature 7..15: note = DNA
  misc_feature 16..20: note = RNA
gcagangtgaagcgaagtgc

SEQ ID NO: 839 - DNA, 20 bp, synthetic construct
  source 1..20: mol_type = other DNA
  modified_base 1: mod_base = OTHER; note = 2'-O-methoxyethyl modified nucleotide with phosphorothioate linkage
  modified_base 2: mod_base = OTHER; note = 2'-O-methoxyethyl 5-methylcytosine with phosphorothioate linkage
  modified_base 3: mod_base = OTHER; note = 2'-O-methoxyethyl modified nucleotide with phosphorothioate linkage
  modified_base 4: mod_base = OTHER; note = 2'-O-methoxyethyl modified nucleotide with phosphorothioate linkage
  modified_base 5: mod_base = OTHER; note = Locked nucleic acid with phosphorothioate linkage
  modified_base 6: mod_base = OTHER; note = 2'-O-methyl modified abasic nucleotide with phosphorothioate linkage
  modified_base 7: mod_base = OTHER; note = Nucleotide with phosphorothioate linkage
  modified_base 8: mod_base = OTHER; note = Thymine with phosphorothioate linkage
  modified_base 9: mod_base = OTHER; note = Nucleotide with phosphorothioate linkage
  modified_base 10: mod_base = OTHER; note = Nucleotide with phosphorothioate linkage
  modified_base 11: mod_base = OTHER; note = Nucleotide with phosphorothioate linkage
  modified_base 12: mod_base = OTHER; note = Nucleotide with phosphorothioate linkage
  modified_base 13: mod_base = OTHER; note = 5-methylcytosine with phosphorothioate linkage
  modified_base 14: mod_base = OTHER; note = Nucleotide with phosphorothioate linkage
  modified_base 15: mod_base = OTHER; note = Nucleotide with phosphorothioate linkage
  modified_base 16: mod_base = OTHER; note = 2'-O-methoxyethyl modified nucleotide with phosphorothioate linkage
  modified_base 17: mod_base = OTHER; note = 2'-O-methoxyethyl modified nucleotide with phosphorothioate linkage
  modified_base 18: mod_base = OTHER; note = Locked thymine with phosphorothioate linkage
  modified_base 19: mod_base = OTHER; note = 2'-O-methoxyethyl modified nucleotide with phosphorothioate linkage
  modified_base 20: mod_base = OTHER; note = 2'-O-methoxyethyl 5-methylcytosine
  misc_feature 1..6: note = RNA
  misc_feature 7..15: note = DNA
  misc_feature 16..20: note = RNA
gcagangtgaagcgaagtgc

SEQ ID NO: 840 - DNA, 20 bp, synthetic construct
  source 1..20: mol_type = other DNA
  modified_base 1: mod_base = OTHER; note = 2'-O-methoxyethyl modified nucleotide with phosphorothioate linkage
  modified_base 2: mod_base = OTHER; note = 2'-O-methoxyethyl 5-methylcytosine with phosphorothioate linkage
  modified_base 3: mod_base = OTHER; note = 2'-O-methoxyethyl modified nucleotide with phosphorothioate linkage
  modified_base 4: mod_base = OTHER; note = 2'-O-methoxyethyl modified nucleotide with phosphorothioate linkage
  modified_base 5: mod_base = OTHER; note = Locked nucleic acid with phosphorothioate linkage
  modified_base 6: mod_base = OTHER; note = 2'-O-methyl modified abasic nucleotide with phosphorothioate linkage
  modified_base 7: mod_base = OTHER; note = Nucleotide with phosphorothioate linkage
  modified_base 8: mod_base = OTHER; note = Thymine with phosphorothioate linkage
  modified_base 9: mod_base = OTHER; note = Nucleotide with phosphorothioate linkage
  modified_base 10: mod_base = OTHER; note = Nucleotide with phosphorothioate linkage
  modified_base 11: mod_base = OTHER; note = Nucleotide with phosphorothioate linkage
  modified_base 12: mod_base = OTHER; note = Nucleotide with phosphorothioate linkage
  modified_base 13: mod_base = OTHER; note = 5-methylcytosine with phosphorothioate linkage
  modified_base 14: mod_base = OTHER; note = Nucleotide with phosphorothioate linkage
  modified_base 15: mod_base = OTHER; note = Nucleotide with phosphorothioate linkage
  modified_base 16: mod_base = OTHER; note = 2'-O-methoxyethyl modified nucleotide with phosphorothioate linkage
  modified_base 17: mod_base = OTHER; note = 2'-O-methoxyethyl modified nucleotide with phosphorothioate linkage
  modified_base 18: mod_base = OTHER; note = 2'-O-methoxyethyl modified thymine with phosphorothioate linkage
  modified_base 19: mod_base = OTHER; note = Locked nucleic acid with phosphorothioate linkage
  modified_base 20: mod_base = OTHER; note = 2'-O-methoxyethyl 5-methylcytosine
  misc_feature 1..6: note = RNA
  misc_feature 7..15: note = DNA
  misc_feature 16..20: note = RNA
gcagangtgaagcgaagtgc

SEQ ID NO: 841 - DNA, 20 bp, synthetic construct
  source 1..20: mol_type = other DNA
  modified_base 1: mod_base = OTHER; note = 2'-O-methoxyethyl modified nucleotide with phosphorothioate linkage
  modified_base 2: mod_base = OTHER; note = 2'-O-methoxyethyl 5-methylcytosine with phosphorothioate linkage
  modified_base 3: mod_base = OTHER; note = 2'-O-methoxyethyl modified nucleotide with phosphorothioate linkage
  modified_base 4: mod_base = OTHER; note = 2'-O-methoxyethyl modified nucleotide with phosphorothioate linkage
  modified_base 5: mod_base = OTHER; note = Locked nucleic acid with phosphorothioate linkage
  modified_base 6: mod_base = OTHER; note = 2'-O-methyl modified abasic nucleotide with phosphorothioate linkage
  modified_base 7: mod_base = OTHER; note = Nucleotide with phosphorothioate linkage
  modified_base 8: mod_base = OTHER; note = Thymine with phosphorothioate linkage
  modified_base 9: mod_base = OTHER; note = Nucleotide with phosphorothioate linkage
  modified_base 10: mod_base = OTHER; note = Nucleotide with phosphorothioate linkage
  modified_base 11: mod_base = OTHER; note = Nucleotide with phosphorothioate linkage
  modified_base 12: mod_base = OTHER; note = Nucleotide with phosphorothioate linkage
  modified_base 13: mod_base = OTHER; note = 5-methylcytosine with phosphorothioate linkage
  modified_base 14: mod_base = OTHER; note = Nucleotide with phosphorothioate linkage
  modified_base 15: mod_base = OTHER; note = Nucleotide with phosphorothioate linkage
  modified_base 16: mod_base = OTHER; note = 2'-O-methoxyethyl modified nucleotide with phosphorothioate linkage
  modified_base 17: mod_base = OTHER; note = 2'-O-methoxyethyl modified nucleotide with phosphorothioate linkage
  modified_base 18: mod_base = OTHER; note = 2'-O-methoxyethyl modified thymine with phosphorothioate linkage
  modified_base 19: mod_base = OTHER; note = 2'-O-methoxyethyl modified nucleotide with phosphorothioate linkage
  modified_base 20: mod_base = OTHER; note = Locked 5-methylcytosine
  misc_feature 1..6: note = RNA
  misc_feature 7..15: note = DNA
  misc_feature 16..20: note = RNA
gcagangtgaagcgaagtgc

SEQ ID NO: 842 - DNA, 20 bp, synthetic construct
  source 1..20: mol_type = other DNA
  modified_base 1: mod_base = OTHER; note = 2'-O-methoxyethyl modified nucleotide with phosphorothioate linkage
  modified_base 2: mod_base = OTHER; note = 2'-O-methoxyethyl 5-methylcytosine with phosphorothioate linkage
  modified_base 3: mod_base = OTHER; note = 2'-O-methoxyethyl modified nucleotide with phosphorothioate linkage
  modified_base 4: mod_base = OTHER; note = 2'-O-methoxyethyl modified nucleotide with phosphorothioate linkage
  modified_base 5: mod_base = OTHER; note = 2'-O-methoxyethyl modified nucleotide with phosphorothioate linkage
  modified_base 6: mod_base = OTHER; note = 2'-O-methyl modified abasic nucleotide with phosphorothioate linkage
  modified_base 7: mod_base = OTHER; note = Nucleotide with phosphorothioate linkage
  modified_base 8: mod_base = OTHER; note = Thymine with phosphorothioate linkage
  modified_base 9: mod_base = OTHER; note = Nucleotide with phosphorothioate linkage
  modified_base 10: mod_base = OTHER; note = Nucleotide with phosphorothioate linkage
  modified_base 11: mod_base = OTHER; note = Nucleotide with phosphorothioate linkage
  modified_base 12: mod_base = OTHER; note = Nucleotide with phosphorothioate linkage
  modified_base 13: mod_base = OTHER; note = 5-methylcytosine with phosphorothioate linkage
  modified_base 14: mod_base = OTHER; note = Nucleotide with phosphorothioate linkage
  modified_base 15: mod_base = OTHER; note = Nucleotide with phosphorothioate linkage
  modified_base 16: mod_base = OTHER; note = Locked nucleic acid with phosphorothioate linkage
  modified_base 17: mod_base = OTHER; note = Locked nucleic acid with phosphorothioate linkage
  modified_base 18: mod_base = OTHER; note = 2'-O-methoxyethyl modified thymine with phosphorothioate linkage
  modified_base 19: mod_base = OTHER; note = 2'-O-methoxyethyl modified nucleotide with phosphorothioate linkage
  modified_base 20: mod_base = OTHER; note = 2'-O-methoxyethyl 5-methylcytosine
  misc_feature 1..6: note = RNA
  misc_feature 7..15: note = DNA
  misc_feature 16..20: note = RNA
gcagangtgaagcgaagtgc

SEQ ID NO: 843 - DNA, 20 bp, synthetic construct
  source 1..20: mol_type = other DNA
  modified_base 1: mod_base = OTHER; note = 2'-O-methoxyethyl modified nucleotide with phosphorothioate linkage
  modified_base 2: mod_base = OTHER; note = 2'-O-methoxyethyl 5-methylcytosine with phosphorothioate linkage
  modified_base 3: mod_base = OTHER; note = 2'-O-methoxyethyl modified nucleotide with phosphorothioate linkage
  modified_base 4: mod_base = OTHER; note = 2'-O-methoxyethyl modified nucleotide with phosphorothioate linkage
  modified_base 5: mod_base = OTHER; note = 2'-O-methoxyethyl modified nucleotide with phosphorothioate linkage
  modified_base 6: mod_base = OTHER; note = 2'-O-methyl modified abasic nucleotide with phosphorothioate linkage
  modified_base 7: mod_base = OTHER; note = Nucleotide with phosphorothioate linkage
  modified_base 8: mod_base = OTHER; note = Thymine with phosphorothioate linkage
  modified_base 9: mod_base = OTHER; note = Nucleotide with phosphorothioate linkage
  modified_base 10: mod_base = OTHER; note = Nucleotide with phosphorothioate linkage
  modified_base 11: mod_base = OTHER; note = Nucleotide with phosphorothioate linkage
  modified_base 12: mod_base = OTHER; note = Nucleotide with phosphorothioate linkage
  modified_base 13: mod_base = OTHER; note = 5-methylcytosine with phosphorothioate linkage
  modified_base 14: mod_base = OTHER; note = Nucleotide with phosphorothioate linkage
  modified_base 15: mod_base = OTHER; note = Nucleotide with phosphorothioate linkage
  modified_base 16: mod_base = OTHER; note = Locked nucleic acid with phosphorothioate linkage
  modified_base 17: mod_base = OTHER; note = 2'-O-methoxyethyl modified nucleotide with phosphorothioate linkage
  modified_base 18: mod_base = OTHER; note = Locked thymine with phosphorothioate linkage
  modified_base 19: mod_base = OTHER; note = 2'-O-methoxyethyl modified nucleotide with phosphorothioate linkage
  modified_base 20: mod_base = OTHER; note = 2'-O-methoxyethyl 5-methylcytosine
  misc_feature 1..6: note = RNA
  misc_feature 7..15: note = DNA
  misc_feature 16..20: note = RNA
gcagangtgaagcgaagtgc

SEQ ID NO: 844 - DNA, 20 bp, synthetic construct
  source 1..20: mol_type = other DNA
  modified_base 1: mod_base = OTHER; note = 2'-O-methoxyethyl modified nucleotide with phosphorothioate linkage
  modified_base 2: mod_base = OTHER; note = 2'-O-methoxyethyl 5-methylcytosine with phosphorothioate linkage
  modified_base 3: mod_base = OTHER; note = 2'-O-methoxyethyl modified nucleotide with phosphorothioate linkage
  modified_base 4: mod_base = OTHER; note = 2'-O-methoxyethyl modified nucleotide with phosphorothioate linkage
  modified_base 5: mod_base = OTHER; note = 2'-O-methoxyethyl modified nucleotide with phosphorothioate linkage
  modified_base 6: mod_base = OTHER; note = 2'-O-methyl modified abasic nucleotide with phosphorothioate linkage
  modified_base 7: mod_base = OTHER; note = Nucleotide with phosphorothioate linkage
  modified_base 8: mod_base = OTHER; note = Thymine with phosphorothioate linkage
  modified_base 9: mod_base = OTHER; note = Nucleotide with phosphorothioate linkage
  modified_base 10: mod_base = OTHER; note = Nucleotide with phosphorothioate linkage
  modified_base 11: mod_base = OTHER; note = Nucleotide with phosphorothioate linkage
  modified_base 12: mod_base = OTHER; note = Nucleotide with phosphorothioate linkage
  modified_base 13: mod_base = OTHER; note = 5-methylcytosine with phosphorothioate linkage
  modified_base 14: mod_base = OTHER; note = Nucleotide with phosphorothioate linkage
  modified_base 15: mod_base = OTHER; note = Nucleotide with phosphorothioate linkage
  modified_base 16: mod_base = OTHER; note = Locked nucleic acid with phosphorothioate linkage
  modified_base 17: mod_base = OTHER; note = 2'-O-methoxyethyl modified nucleotide with phosphorothioate linkage
  modified_base 18: mod_base = OTHER; note = 2'-O-methoxyethyl modified thymine with phosphorothioate linkage
  modified_base 19: mod_base = OTHER; note = Locked nucleic acid with phosphorothioate linkage
  modified_base 20: mod_base = OTHER; note = 2'-O-methoxyethyl 5-methylcytosine
  misc_feature 1..6: note = RNA
  misc_feature 7..15: note = DNA
  misc_feature 16..20: note = RNA
gcagangtgaagcgaagtgc

SEQ ID NO: 845 - DNA, 20 bp, synthetic construct
  source 1..20: mol_type = other DNA
  modified_base 1: mod_base = OTHER; note = 2'-O-methoxyethyl modified nucleotide with phosphorothioate linkage
  modified_base 2: mod_base = OTHER; note = 2'-O-methoxyethyl 5-methylcytosine with phosphorothioate linkage
  modified_base 3: mod_base = OTHER; note = 2'-O-methoxyethyl modified nucleotide with phosphorothioate linkage
  modified_base 4: mod_base = OTHER; note = 2'-O-methoxyethyl modified nucleotide with phosphorothioate linkage
  modified_base 5: mod_base = OTHER; note = 2'-O-methoxyethyl modified nucleotide with phosphorothioate linkage
  modified_base 6: mod_base = OTHER; note = 2'-O-methyl modified abasic nucleotide with phosphorothioate linkage
  modified_base 7: mod_base = OTHER; note = Nucleotide with phosphorothioate linkage
  modified_base 8: mod_base = OTHER; note = Thymine with phosphorothioate linkage
  modified_base 9: mod_base = OTHER; note = Nucleotide with phosphorothioate linkage
  modified_base 10: mod_base = OTHER; note = Nucleotide with phosphorothioate linkage
  modified_base 11: mod_base = OTHER; note = Nucleotide with phosphorothioate linkage
  modified_base 12: mod_base = OTHER; note = Nucleotide with phosphorothioate linkage
  modified_base 13: mod_base = OTHER; note = 5-methylcytosine with phosphorothioate linkage
  modified_base 14: mod_base = OTHER; note = Nucleotide with phosphorothioate linkage
  modified_base 15: mod_base = OTHER; note = Nucleotide with phosphorothioate linkage
  modified_base 16: mod_base = OTHER; note = Locked nucleic acid with phosphorothioate linkage
  modified_base 17: mod_base = OTHER; note = 2'-O-methoxyethyl modified nucleotide with phosphorothioate linkage
  modified_base 18: mod_base = OTHER; note = 2'-O-methoxyethyl modified thymine with phosphorothioate linkage
  modified_base 19: mod_base = OTHER; note = 2'-O-methoxyethyl modified nucleotide with phosphorothioate linkage
  modified_base 20: mod_base = OTHER; note = Locked 5-methylcytosine
  misc_feature 1..6: note = RNA
  misc_feature 7..15: note = DNA
  misc_feature 16..20: note = RNA
gcagangtgaagcgaagtgc

SEQ ID NO: 846 - DNA, 20 bp, synthetic construct
  source 1..20: mol_type = other DNA
  modified_base 1: mod_base = OTHER; note = 2'-O-methoxyethyl modified nucleotide with phosphorothioate linkage
  modified_base 2: mod_base = OTHER; note = 2'-O-methoxyethyl 5-methylcytosine with phosphorothioate linkage
  modified_base 3: mod_base = OTHER; note = 2'-O-methoxyethyl modified nucleotide with phosphorothioate linkage
  modified_base 4: mod_base = OTHER; note = 2'-O-methoxyethyl modified nucleotide with phosphorothioate linkage
  modified_base 5: mod_base = OTHER; note = 2'-O-methoxyethyl modified nucleotide with phosphorothioate linkage
  modified_base 6: mod_base = OTHER; note = 2'-O-methyl modified abasic nucleotide with phosphorothioate linkage
  modified_base 7: mod_base = OTHER; note = Nucleotide with phosphorothioate linkage
  modified_base 8: mod_base = OTHER; note = Thymine with phosphorothioate linkage
  modified_base 9: mod_base = OTHER; note = Nucleotide with phosphorothioate linkage
  modified_base 10: mod_base = OTHER; note = Nucleotide with phosphorothioate linkage
  modified_base 11: mod_base = OTHER; note = Nucleotide with phosphorothioate linkage
  modified_base 12: mod_base = OTHER; note = Nucleotide with phosphorothioate linkage
  modified_base 13: mod_base = OTHER; note = 5-methylcytosine with phosphorothioate linkage
  modified_base 14: mod_base = OTHER; note = Nucleotide with phosphorothioate linkage
  modified_base 15: mod_base = OTHER; note = Nucleotide with phosphorothioate linkage
  modified_base 16: mod_base = OTHER; note = 2'-O-methoxyethyl modified nucleotide with phosphorothioate linkage
  modified_base 17: mod_base = OTHER; note = Locked nucleic acid with phosphorothioate linkage
  modified_base 18: mod_base = OTHER; note = Locked thymine with phosphorothioate linkage
  modified_base 19: mod_base = OTHER; note = 2'-O-methoxyethyl modified nucleotide with phosphorothioate linkage
  modified_base 20: mod_base = OTHER; note = 2'-O-methoxyethyl 5-methylcytosine
  misc_feature 1..6: note = RNA
  misc_feature 7..15: note = DNA
  misc_feature 16..20: note = RNA
gcagangtgaagcgaagtgc

SEQ ID NO: 847 - DNA, 20 bp, synthetic construct
  source 1..20: mol_type = other DNA
  modified_base 1: mod_base = OTHER; note = 2'-O-methoxyethyl modified nucleotide with phosphorothioate linkage
  modified_base 2: mod_base = OTHER; note = 2'-O-methoxyethyl 5-methylcytosine with phosphorothioate linkage
  modified_base 3: mod_base = OTHER; note = 2'-O-methoxyethyl modified nucleotide with phosphorothioate linkage
  modified_base 4: mod_base = OTHER; note = 2'-O-methoxyethyl modified nucleotide with phosphorothioate linkage
  modified_base 5: mod_base = OTHER; note = 2'-O-methoxyethyl modified nucleotide with phosphorothioate linkage
  modified_base 6: mod_base = OTHER; note = 2'-O-methyl modified abasic nucleotide with phosphorothioate linkage
  modified_base 7: mod_base = OTHER; note = Nucleotide with phosphorothioate linkage
  modified_base 8: mod_base = OTHER; note = Thymine with phosphorothioate linkage
  modified_base 9: mod_base = OTHER; note = Nucleotide with phosphorothioate linkage
  modified_base 10: mod_base = OTHER; note = Nucleotide with phosphorothioate linkage
  modified_base 11: mod_base = OTHER; note = Nucleotide with phosphorothioate linkage
  modified_base 12: mod_base = OTHER; note = Nucleotide with phosphorothioate linkage
  modified_base 13: mod_base = OTHER; note = 5-methylcytosine with phosphorothioate linkage
  modified_base 14: mod_base = OTHER; note = Nucleotide with phosphorothioate linkage
  modified_base 15: mod_base = OTHER; note = Nucleotide with phosphorothioate linkage
  modified_base 16: mod_base = OTHER; note = 2'-O-methoxyethyl modified nucleotide with phosphorothioate linkage
  modified_base 17: mod_base = OTHER; note = Locked nucleic acid with phosphorothioate linkage
  modified_base 18: mod_base = OTHER; note = 2'-O-methoxyethyl modified thymine with phosphorothioate linkage
  modified_base 19: mod_base = OTHER; note = Locked nucleic acid with phosphorothioate linkage
  modified_base 20: mod_base = OTHER; note = 2'-O-methoxyethyl 5-methylcytosine
  misc_feature 1..6: note = RNA
  misc_feature 7..15: note = DNA
  misc_feature 16..20: note = RNA
gcagangtgaagcgaagtgc

SEQ ID NO: 848 - DNA, 20 bp, synthetic construct
  source 1..20: mol_type = other DNA
  modified_base 1: mod_base = OTHER; note = 2'-O-methoxyethyl modified nucleotide with phosphorothioate linkage
  modified_base 2: mod_base = OTHER; note = 2'-O-methoxyethyl 5-methylcytosine with phosphorothioate linkage
  modified_base 3: mod_base = OTHER; note = 2'-O-methoxyethyl modified nucleotide with phosphorothioate linkage
  modified_base 4: mod_base = OTHER; note = 2'-O-methoxyethyl modified nucleotide with phosphorothioate linkage
  modified_base 5: mod_base = OTHER; note = 2'-O-methoxyethyl modified nucleotide with phosphorothioate linkage
  modified_base 6: mod_base = OTHER; note = 2'-O-methyl modified abasic nucleotide with phosphorothioate linkage
  modified_base 7: mod_base = OTHER; note = Nucleotide with phosphorothioate linkage
  modified_base 8: mod_base = OTHER; note = Thymine with phosphorothioate linkage
  modified_base 9: mod_base = OTHER; note = Nucleotide with phosphorothioate linkage
  modified_base 10: mod_base = OTHER; note = Nucleotide with phosphorothioate linkage
  modified_base 11: mod_base = OTHER; note = Nucleotide with phosphorothioate linkage
  modified_base 12: mod_base = OTHER; note = Nucleotide with phosphorothioate linkage
  modified_base 13: mod_base = OTHER; note = 5-methylcytosine with phosphorothioate linkage
  modified_base 14: mod_base = OTHER; note = Nucleotide with phosphorothioate linkage
  modified_base 15: mod_base = OTHER; note = Nucleotide with phosphorothioate linkage
  modified_base 16: mod_base = OTHER; note = 2'-O-methoxyethyl modified nucleotide with phosphorothioate linkage
  modified_base 17: mod_base = OTHER; note = Locked nucleic acid with phosphorothioate linkage
  modified_base 18: mod_base = OTHER; note = 2'-O-methoxyethyl modified thymine with phosphorothioate linkage
  modified_base 19: mod_base = OTHER; note = 2'-O-methoxyethyl modified nucleotide with phosphorothioate linkage
  modified_base 20: mod_base = OTHER; note = Locked 5-methylcytosine
  misc_feature 1..6: note = RNA
  misc_feature 7..15: note = DNA
  misc_feature 16..20: note = RNA
gcagangtgaagcgaagtgc

SEQ ID NO: 849 - DNA, 20 bp, synthetic construct
  source 1..20: mol_type = other DNA
  modified_base 1: mod_base = OTHER; note = 2'-O-methoxyethyl modified nucleotide with phosphorothioate linkage
  modified_base 2: mod_base = OTHER; note = 2'-O-methoxyethyl 5-methylcytosine with phosphorothioate linkage
  modified_base 3: mod_base = OTHER; note = 2'-O-methoxyethyl modified nucleotide with phosphorothioate linkage
  modified_base 4: mod_base = OTHER; note = 2'-O-methoxyethyl modified nucleotide with phosphorothioate linkage
  modified_base 5: mod_base = OTHER; note = 2'-O-methoxyethyl modified nucleotide with phosphorothioate linkage
  modified_base 6: mod_base = OTHER; note = 2'-O-methyl modified abasic nucleotide with phosphorothioate linkage
  modified_base 7: mod_base = OTHER; note = Nucleotide with phosphorothioate linkage
  modified_base 8: mod_base = OTHER; note = Thymine with phosphorothioate linkage
  modified_base 9: mod_base = OTHER; note = Nucleotide with phosphorothioate linkage
  modified_base 10: mod_base = OTHER; note = Nucleotide with phosphorothioate linkage
  modified_base 11: mod_base = OTHER; note = Nucleotide with phosphorothioate linkage
  modified_base 12: mod_base = OTHER; note = Nucleotide with phosphorothioate linkage
  modified_base 13: mod_base = OTHER; note = 5-methylcytosine with phosphorothioate linkage
  modified_base 14: mod_base = OTHER; note = Nucleotide with phosphorothioate linkage
  modified_base 15: mod_base = OTHER; note = Nucleotide with phosphorothioate linkage
  modified_base 16: mod_base = OTHER; note = 2'-O-methoxyethyl modified nucleotide with phosphorothioate linkage
  modified_base 17: mod_base = OTHER; note = 2'-O-methoxyethyl modified nucleotide with phosphorothioate linkage
  modified_base 18: mod_base = OTHER; note = Locked thymine with phosphorothioate linkage
  modified_base 19: mod_base = OTHER; note = Locked nucleic acid with phosphorothioate linkage
  modified_base 20: mod_base = OTHER; note = 2'-O-methoxyethyl 5-methylcytosine
  misc_feature 1..6: note = RNA
  misc_feature 7..15: note = DNA
  misc_feature 16..20: note = RNA
gcagangtgaagcgaagtgc

SEQ ID NO: 850 - DNA, 20 bp, synthetic construct
  source 1..20: mol_type = other DNA
  modified_base 1: mod_base = OTHER; note = 2'-O-methoxyethyl modified nucleotide with phosphorothioate linkage
  modified_base 2: mod_base = OTHER; note = 2'-O-methoxyethyl 5-methylcytosine with phosphorothioate linkage
  modified_base 3: mod_base = OTHER; note = 2'-O-methoxyethyl modified nucleotide with phosphorothioate linkage
  modified_base 4: mod_base = OTHER; note = 2'-O-methoxyethyl modified nucleotide with phosphorothioate linkage
  modified_base 5: mod_base = OTHER; note = 2'-O-methoxyethyl modified nucleotide with phosphorothioate linkage
  modified_base 6: mod_base = OTHER; note = 2'-O-methyl modified abasic nucleotide with phosphorothioate linkage
  modified_base 7: mod_base = OTHER; note = Nucleotide with phosphorothioate linkage
  modified_base 8: mod_base = OTHER; note = Thymine with phosphorothioate linkage
  modified_base 9: mod_base = OTHER; note = Nucleotide with phosphorothioate linkage
  modified_base 10: mod_base = OTHER; note = Nucleotide with phosphorothioate linkage
  modified_base 11: mod_base = OTHER; note = Nucleotide with phosphorothioate linkage
  modified_base 12: mod_base = OTHER; note = Nucleotide with phosphorothioate linkage
  modified_base 13: mod_base = OTHER; note = 5-methylcytosine with phosphorothioate linkage
  modified_base 14: mod_base = OTHER; note = Nucleotide with phosphorothioate linkage
  modified_base 15: mod_base = OTHER; note = Nucleotide with phosphorothioate linkage
  modified_base 16: mod_base = OTHER; note = 2'-O-methoxyethyl modified nucleotide with phosphorothioate linkage
  modified_base 17: mod_base = OTHER; note = 2'-O-methoxyethyl modified nucleotide with phosphorothioate linkage
  modified_base 18: mod_base = OTHER; note = Locked thymine with phosphorothioate linkage
  modified_base 19: mod_base = OTHER; note = 2'-O-methoxyethyl modified nucleotide with phosphorothioate linkage
  modified_base 20: mod_base = OTHER; note = Locked 5-methylcytosine
  misc_feature 1..6: note = RNA
  misc_feature 7..15: note = DNA
  misc_feature 16..20: note = RNA
gcagangtgaagcgaagtgc

SEQ ID NO: 851 - DNA, 20 bp, synthetic construct
  source 1..20: mol_type = other DNA
  modified_base 1: mod_base = OTHER; note = 2'-O-methoxyethyl modified nucleotide with phosphorothioate linkage
  modified_base 2: mod_base = OTHER; note = 2'-O-methoxyethyl 5-methylcytosine with phosphorothioate linkage
  modified_base 3: mod_base = OTHER; note = 2'-O-methoxyethyl modified nucleotide with phosphorothioate linkage
  modified_base 4: mod_base = OTHER; note = 2'-O-methoxyethyl modified nucleotide with phosphorothioate linkage
  modified_base 5: mod_base = OTHER; note = 2'-O-methoxyethyl modified nucleotide with phosphorothioate linkage
  modified_base 6: mod_base = OTHER; note = 2'-O-methyl modified abasic nucleotide with phosphorothioate linkage
  modified_base 7: mod_base = OTHER; note = Nucleotide with phosphorothioate linkage
  modified_base 8: mod_base = OTHER; note = Thymine with phosphorothioate linkage
  modified_base 9: mod_base = OTHER; note = Nucleotide with phosphorothioate linkage
  modified_base 10: mod_base = OTHER; note = Nucleotide with phosphorothioate linkage
  modified_base 11: mod_base = OTHER; note = Nucleotide with phosphorothioate linkage
  modified_base 12: mod_base = OTHER; note = Nucleotide with phosphorothioate linkage
  modified_base 13: mod_base = OTHER; note = 5-methylcytosine with phosphorothioate linkage
  modified_base 14: mod_base = OTHER; note = Nucleotide with phosphorothioate linkage
  modified_base 15: mod_base = OTHER; note = Nucleotide with phosphorothioate linkage
  modified_base 16: mod_base = OTHER; note = 2'-O-methoxyethyl modified nucleotide with phosphorothioate linkage
  modified_base 17: mod_base = OTHER; note = 2'-O-methoxyethyl modified nucleotide with phosphorothioate linkage
  modified_base 18: mod_base = OTHER; note = 2'-O-methoxyethyl modified thymine with phosphorothioate linkage
  modified_base 19: mod_base = OTHER; note = Locked nucleic acid with phosphorothioate linkage
  modified_base 20: mod_base = OTHER; note = Locked 5-methylcytosine
  misc_feature 1..6: note = RNA
  misc_feature 7..15: note = DNA
  misc_feature 16..20: note = RNA
gcagangtgaagcgaagtgc

SEQ ID NO: 852 - DNA, 20 bp, synthetic construct
  source 1..20: mol_type = other DNA
  modified_base 1: mod_base = OTHER; note = 2'-O-methoxyethyl 5-methylcytosine with phosphorothioate linkage
  modified_base 2: mod_base = OTHER; note = 2'-O-methoxyethyl modified nucleotide with phosphorothioate linkage
  modified_base 3: mod_base = OTHER; note = Tert-butylguanidine bridged nucleic acid with phosphorothioate linkage
  modified_base 4: mod_base = OTHER; note = 2'-O-methoxyethyl modified nucleotide with phosphorothioate linkage
  modified_base 5: mod_base = OTHER; note = 2'-O-methoxyethyl modified nucleotide with phosphorothioate linkage
  modified_base 6: mod_base = OTHER; note = Nucleotide with phosphorothioate linkage
  modified_base 7: mod_base = OTHER; note = Thymine with phosphorothioate linkage
  modified_base 8: mod_base = OTHER; note = Nucleotide with phosphorothioate linkage
  modified_base 9: mod_base = OTHER; note = Nucleotide with phosphorothioate linkage
  modified_base 10: mod_base = OTHER; note = Nucleotide with phosphorothioate linkage
  modified_base 11: mod_base = OTHER; note = Nucleotide with phosphorothioate linkage
  modified_base 12: mod_base = OTHER; note = 5-methylcytosine with phosphorothioate linkage
  modified_base 13: mod_base = OTHER; note = Nucleotide with phosphorothioate linkage
  modified_base 14: mod_base = OTHER; note = Nucleotide with phosphorothioate linkage
  modified_base 15: mod_base = OTHER; note = Nucleotide with phosphorothioate linkage
  modified_base 16: mod_base = OTHER; note = 2'-O-methoxyethyl modified nucleotide with phosphorothioate linkage
  modified_base 17: mod_base = OTHER; note = 2'-O-methoxyethyl modified thymine with phosphorothioate linkage
  modified_base 18: mod_base = OTHER; note = Tert-butylguanidine bridged nucleic acid with phosphorothioate linkage
  modified_base 19: mod_base = OTHER; note = 2'-O-methoxyethyl 5-methylcytosine with phosphorothioate linkage
  modified_base 20: mod_base = OTHER; note = 2'-O-methoxyethyl modified nucleotide
  misc_feature 1..5: note = RNA
  misc_feature 6..15: note = DNA
  misc_feature 16..20: note = RNA
cagaggtgaagcgaagtgca

SEQ ID NO: 853 - DNA, 21 bp, synthetic construct
  source 1..21: mol_type = other DNA
  modified_base 1: mod_base = OTHER; note = Nucleotide with phosphorothioate linkage
  modified_base 2: mod_base = OTHER; note = Nucleotide with phosphorothioate linkage
  modified_base 3: mod_base = OTHER; note = Thymine with phosphorothioate linkage
  modified_base 4: mod_base = OTHER; note = Nucleotide with phosphorothioate linkage
  modified_base 5: mod_base = OTHER; note = Nucleotide with phosphorothioate linkage
  modified_base 6: mod_base = OTHER; note = Nucleotide with phosphorothioate linkage
  modified_base 7: mod_base = OTHER; note = Nucleotide with phosphorothioate linkage
  modified_base 8: mod_base = OTHER; note = 5-methylcytosine with phosphorothioate linkage
  modified_base 9: mod_base = OTHER; note = Nucleotide with phosphorothioate linkage
  modified_base 10: mod_base = OTHER; note = Nucleotide with phosphorothioate linkage
  modified_base 11: mod_base = OTHER; note = 2'-O-methoxyethyl modified nucleotide with phosphorothioate linkage
  modified_base 12: mod_base = OTHER; note = 2'-O-methoxyethyl modified nucleotide with phosphorothioate linkage
  modified_base 13: mod_base = OTHER; note = 2'-O-methoxyethyl modified thymine with phosphorothioate linkage
  modified_base 14: mod_base = OTHER; note = 2'-O-methoxyethyl modified nucleotide with phosphorothioate linkage
  modified_base 15: mod_base = OTHER; note = 2'-O-methoxyethyl 5-methylcytosine with phosphorothioate linkage
  modified_base 16: mod_base = OTHER; note = 2'-O-methoxyethyl modified nucleotide with phosphorothioate linkage
  modified_base 17: mod_base = OTHER; note = 2'-O-methoxyethyl 5-methylcytosine with phosphorothioate linkage
  modified_base 18: mod_base = OTHER; note = 2'-O-methoxyethyl modified nucleotide with phosphorothioate linkage
  modified_base 19: mod_base = OTHER; note = 2'-O-methoxyethyl modified nucleotide with phosphorothioate linkage
  modified_base 20: mod_base = OTHER; note = 2'-O-methoxyethyl modified nucleotide with phosphorothioate linkage
  modified_base 21: mod_base = OTHER; note = 2'-O-methoxyethyl modified nucleotide
  misc_feature 1..10: note = DNA
  misc_feature 11..21: note = RNA
ggtgaagcgaagtgcacaaga

SEQ ID NO: 854 - DNA, 21 bp, synthetic construct
  source 1..21: mol_type = other DNA
  modified_base 1: mod_base = OTHER; note = 2'-O-methoxyethyl modified nucleotide with phosphorothioate linkage
  modified_base 2: mod_base = OTHER; note = Nucleotide with phosphorothioate linkage
  modified_base 3: mod_base = OTHER; note = Nucleotide with phosphorothioate linkage
  modified_base 4: mod_base = OTHER; note = Thymine with phosphorothioate linkage
  modified_base 5: mod_base = OTHER; note = Nucleotide with phosphorothioate linkage
  modified_base 6: mod_base = OTHER; note = Nucleotide with phosphorothioate linkage
  modified_base 7: mod_base = OTHER; note = Nucleotide with phosphorothioate linkage
  modified_base 8: mod_base = OTHER; note = Nucleotide with phosphorothioate linkage
  modified_base 9: mod_base = OTHER; note = 5-methylcytosine with phosphorothioate linkage
  modified_base 10: mod_base = OTHER; note = Nucleotide with phosphorothioate linkage
  modified_base 11: mod_base = OTHER; note = Nucleotide with phosphorothioate linkage
  modified_base 12: mod_base = OTHER; note = 2'-O-methoxyethyl modified nucleotide with phosphorothioate linkage
  modified_base 13: mod_base = OTHER; note = 2'-O-methoxyethyl modified nucleotide with phosphorothioate linkage
  modified_base 14: mod_base = OTHER; note = 2'-O-methoxyethyl modified thymine with phosphorothioate linkage
  modified_base 15: mod_base = OTHER; note = 2'-O-methoxyethyl modified nucleotide with phosphorothioate linkage
  modified_base 16: mod_base = OTHER; note = 2'-O-methoxyethyl 5-methylcytosine with phosphorothioate linkage
  modified_base 17: mod_base = OTHER; note = 2'-O-methoxyethyl modified nucleotide with phosphorothioate linkage
  modified_base 18: mod_base = OTHER; note = 2'-O-methoxyethyl 5-methylcytosine with phosphorothioate linkage
  modified_base 19: mod_base = OTHER; note = 2'-O-methoxyethyl modified nucleotide with phosphorothioate linkage
  modified_base 20: mod_base = OTHER; note = 2'-O-methoxyethyl modified nucleotide with phosphorothioate linkage
  modified_base 21: mod_base = OTHER; note = 2'-O-methoxyethyl modified nucleotide
  misc_feature 1: note = RNA
  misc_feature 2..11: note = DNA
  misc_feature 12..21: note = RNA
aggtgaagcgaagtgcacaag

SEQ ID NO: 855 - DNA, 21 bp, synthetic construct
  source 1..21: mol_type = other DNA
  modified_base 1: mod_base = OTHER; note = 2'-O-methoxyethyl modified nucleotide with phosphorothioate linkage
  modified_base 2: mod_base = OTHER; note = 2'-O-methoxyethyl modified nucleotide with phosphorothioate linkage
  modified_base 3: mod_base = OTHER; note = Nucleotide with phosphorothioate linkage
  modified_base 4: mod_base = OTHER; note = Nucleotide with phosphorothioate linkage
  modified_base 5: mod_base = OTHER; note = Thymine with phosphorothioate linkage
  modified_base 6: mod_base = OTHER; note = Nucleotide with phosphorothioate linkage
  modified_base 7: mod_base = OTHER; note = Nucleotide with phosphorothioate linkage
  modified_base 8: mod_base = OTHER; note = Nucleotide with phosphorothioate linkage
  modified_base 9: mod_base = OTHER; note = Nucleotide with phosphorothioate linkage
  modified_base 10: mod_base = OTHER; note = 5-methylcytosine with phosphorothioate linkage
  modified_base 11: mod_base = OTHER; note = Nucleotide with phosphorothioate linkage
  modified_base 12: mod_base = OTHER; note = Nucleotide with phosphorothioate linkage
  modified_base 13: mod_base = OTHER; note = 2'-O-methoxyethyl modified nucleotide with phosphorothioate linkage
  modified_base 14: mod_base = OTHER; note = 2'-O-methoxyethyl modified nucleotide with phosphorothioate linkage
  modified_base 15: mod_base = OTHER; note = 2'-O-methoxyethyl modified thymine with phosphorothioate linkage
  modified_base 16: mod_base = OTHER; note = 2'-O-methoxyethyl modified nucleotide with phosphorothioate linkage
  modified_base 17: mod_base = OTHER; note = 2'-O-methoxyethyl 5-methylcytosine with phosphorothioate linkage
  modified_base 18: mod_base = OTHER; note = 2'-O-methoxyethyl modified nucleotide with phosphorothioate linkage
  modified_base 19: mod_base = OTHER; note = 2'-O-methoxyethyl 5-methylcytosine with phosphorothioate linkage
  modified_base 20: mod_base = OTHER; note = 2'-O-methoxyethyl modified nucleotide with phosphorothioate linkage
  modified_base 21: mod_base = OTHER; note = 2'-O-methoxyethyl modified nucleotide
  misc_feature 1..2: note = RNA
  misc_feature 3..12: note = DNA
  misc_feature 13..21: note = RNA
gaggtgaagcgaagtgcacaa

SEQ ID NO: 856 - DNA, 21 bp, synthetic construct
  source 1..21: mol_type = other DNA
  modified_base 1: mod_base = OTHER; note = 2'-O-methoxyethyl modified nucleotide with phosphorothioate linkage
  modified_base 2: mod_base = OTHER; note = 2'-O-methoxyethyl modified nucleotide with phosphorothioate linkage
  modified_base 3: mod_base = OTHER; note = 2'-O-methoxyethyl modified nucleotide with phosphorothioate linkage
  modified_base 4: mod_base = OTHER; note = Nucleotide with phosphorothioate linkage
  modified_base 5: mod_base = OTHER; note = Nucleotide with phosphorothioate linkage
  modified_base 6: mod_base = OTHER; note = Thymine with phosphorothioate linkage
  modified_base 7: mod_base = OTHER; note = Nucleotide with phosphorothioate linkage
  modified_base 8: mod_base = OTHER; note = Nucleotide with phosphorothioate linkage
  modified_base 9: mod_base = OTHER; note = Nucleotide with phosphorothioate linkage
  modified_base 10: mod_base = OTHER; note = Nucleotide with phosphorothioate linkage
  modified_base 11: mod_base = OTHER; note = 5-methylcytosine with phosphorothioate linkage
  modified_base 12: mod_base = OTHER; note = Nucleotide with phosphorothioate linkage
  modified_base 13: mod_base = OTHER; note = Nucleotide with phosphorothioate linkage
  modified_base 14: mod_base = OTHER; note = 2'-O-methoxyethyl modified nucleotide with phosphorothioate linkage
  modified_base 15: mod_base = OTHER; note = 2'-O-methoxyethyl modified nucleotide with phosphorothioate linkage
  modified_base 16: mod_base = OTHER; note = 2'-O-methoxyethyl modified thymine with phosphorothioate linkage
  modified_base 17: mod_base = OTHER; note = 2'-O-methoxyethyl modified nucleotide with phosphorothioate linkage
  modified_base 18: mod_base = OTHER; note = 2'-O-methoxyethyl 5-methylcytosine with phosphorothioate linkage
  modified_base 19: mod_base = OTHER; note = 2'-O-methoxyethyl modified nucleotide with phosphorothioate linkage
  modified_base 20: mod_base = OTHER; note = 2'-O-methoxyethyl 5-methylcytosine with phosphorothioate linkage
  modified_base 21: mod_base = OTHER; note = 2'-O-methoxyethyl modified nucleotide
  misc_feature 1..3: note = RNA
  misc_feature 4..13: note = DNA
  misc_feature 14..21: note = RNA
agaggtgaagcgaagtgcaca

SEQ ID NO: 857 - DNA, 21 bp, synthetic construct
  source 1..21: mol_type = other DNA
  modified_base 1: mod_base = OTHER; note = 2'-O-methoxyethyl 5-methylcytosine with phosphorothioate linkage
  modified_base 2: mod_base = OTHER; note = 2'-O-methoxyethyl modified nucleotide with phosphorothioate linkage
  modified_base 3: mod_base = OTHER; note = 2'-O-methoxyethyl modified nucleotide with phosphorothioate linkage
  modified_base 4: mod_base = OTHER; note = 2'-O-methoxyethyl modified nucleotide with phosphorothioate linkage
  modified_base 5: mod_base = OTHER; note = Nucleotide with phosphorothioate linkage
  modified_base 6: mod_base = OTHER; note = Nucleotide with phosphorothioate linkage
  modified_base 7: mod_base = OTHER; note = Thymine with phosphorothioate linkage
  modified_base 8: mod_base = OTHER; note = Nucleotide with phosphorothioate linkage
  modified_base 9: mod_base = OTHER; note = Nucleotide with phosphorothioate linkage
  modified_base 10: mod_base = OTHER; note = Nucleotide with phosphorothioate linkage
  modified_base 11: mod_base = OTHER; note = Nucleotide with phosphorothioate linkage
  modified_base 12: mod_base = OTHER; note = 5-methylcytosine with phosphorothioate linkage
  modified_base 13: mod_base = OTHER; note = Nucleotide with phosphorothioate linkage
  modified_base 14: mod_base = OTHER; note = Nucleotide with phosphorothioate linkage
  modified_base 15: mod_base = OTHER; note = 2'-O-methoxyethyl modified nucleotide with phosphorothioate linkage
  modified_base 16: mod_base = OTHER; note = 2'-O-methoxyethyl modified nucleotide with phosphorothioate linkage
  modified_base 17: mod_base = OTHER; note = 2'-O-methoxyethyl modified thymine with phosphorothioate linkage
  modified_base 18: mod_base = OTHER; note = 2'-O-methoxyethyl modified nucleotide with phosphorothioate linkage
  modified_base 19: mod_base = OTHER; note = 2'-O-methoxyethyl 5-methylcytosine with phosphorothioate linkage
  modified_base 20: mod_base = OTHER; note = 2'-O-methoxyethyl modified nucleotide with phosphorothioate linkage
  modified_base 21: mod_base = OTHER; note = 2'-O-methoxyethyl 5-methylcytosine
  misc_feature 1..4: note = RNA
  misc_feature 5..14: note = DNA
  misc_feature 15..21: note = RNA
cagaggtgaagcgaagtgcac

SEQ ID NO: 858 - DNA, 21 bp, synthetic construct
  source 1..21: mol_type = other DNA
  modified_base 1: mod_base = OTHER; note = 2'-O-methoxyethyl modified nucleotide with phosphorothioate linkage
  modified_base 2: mod_base = OTHER; note = 2'-O-methoxyethyl modified thymine with phosphorothioate linkage
  modified_base 3: mod_base = OTHER; note = 2'-O-methoxyethyl modified nucleotide with phosphorothioate linkage
  modified_base 4: mod_base = OTHER; note = 2'-O-methoxyethyl 5-methylcytosine with phosphorothioate linkage
  modified_base 5: mod_base = OTHER; note = 2'-O-methoxyethyl modified nucleotide with phosphorothioate linkage
  modified_base 6: mod_base = OTHER; note = 2'-O-methoxyethyl modified nucleotide with phosphorothioate linkage
  modified_base 7: mod_base = OTHER; note = 2'-O-methoxyethyl modified nucleotide with phosphorothioate linkage
  modified_base 8: mod_base = OTHER; note = Nucleotide with phosphorothioate linkage
  modified_base 9: mod_base = OTHER; note = Nucleotide with phosphorothioate linkage
  modified_base 10: mod_base = OTHER; note = Thymine with phosphorothioate linkage
  modified_base 11: mod_base = OTHER; note = Nucleotide with phosphorothioate linkage
  modified_base 12: mod_base = OTHER; note = Nucleotide with phosphorothioate linkage
  modified_base 13: mod_base = OTHER; note = Nucleotide with phosphorothioate linkage
  modified_base 14: mod_base = OTHER; note = Nucleotide with phosphorothioate linkage
  modified_base 15: mod_base = OTHER; note = 5-methylcytosine with phosphorothioate linkage
  modified_base 16: mod_base = OTHER; note = Nucleotide with phosphorothioate linkage
  modified_base 17: mod_base = OTHER; note = Nucleotide with phosphorothioate linkage
  modified_base 18: mod_base = OTHER; note = 2'-O-methoxyethyl modified nucleotide with phosphorothioate linkage
  modified_base 19: mod_base = OTHER; note = 2'-O-methoxyethyl modified nucleotide with phosphorothioate linkage
  modified_base 20: mod_base = OTHER; note = 2'-O-methoxyethyl modified thymine with phosphorothioate linkage
  modified_base 21: mod_base = OTHER; note = 2'-O-methoxyethyl modified nucleotide
  misc_feature 1..7: note = RNA
  misc_feature 8..17: note = DNA
  misc_feature 18..21: note = RNA
gtgcagaggtgaagcgaagtg

SEQ ID NO: 859 - DNA, 21 bp, synthetic construct
  source 1..21: mol_type = other DNA
  modified_base 1: mod_base = OTHER; note = 2'-O-methoxyethyl 5-methylcytosine with phosphorothioate linkage
  modified_base 2: mod_base = OTHER; note = 2'-O-methoxyethyl modified nucleotide with phosphorothioate linkage
  modified_base 3: mod_base = OTHER; note = 2'-O-methoxyethyl modified thymine with phosphorothioate linkage
  modified_base 4: mod_base = OTHER; note = 2'-O-methoxyethyl modified nucleotide with phosphorothioate linkage
  modified_base 5: mod_base = OTHER; note = 2'-O-methoxyethyl 5-methylcytosine with phosphorothioate linkage
  modified_base 6: mod_base = OTHER; note = 2'-O-methoxyethyl modified nucleotide with phosphorothioate linkage
  modified_base 7: mod_base = OTHER; note = 2'-O-methoxyethyl modified nucleotide with phosphorothioate linkage
  modified_base 8: mod_base = OTHER; note = 2'-O-methoxyethyl modified nucleotide with phosphorothioate linkage
  modified_base 9: mod_base = OTHER; note = Nucleotide with phosphorothioate linkage
  modified_base 10: mod_base = OTHER; note = Nucleotide with phosphorothioate linkage
  modified_base 11: mod_base = OTHER; note = Thymine with phosphorothioate linkage
  modified_base 12: mod_base = OTHER; note = Nucleotide with phosphorothioate linkage
  modified_base 13: mod_base = OTHER; note = Nucleotide with phosphorothioate linkage
  modified_base 14: mod_base = OTHER; note = Nucleotide with phosphorothioate linkage
  modified_base 15: mod_base = OTHER; note = Nucleotide with phosphorothioate linkage
  modified_base 16: mod_base = OTHER; note = 5-methylcytosine with phosphorothioate linkage
  modified_base 17: mod_base = OTHER; note = Nucleotide with phosphorothioate linkage
  modified_base 18: mod_base = OTHER; note = Nucleotide with phosphorothioate linkage
  modified_base 19: mod_base = OTHER; note = 2'-O-methoxyethyl modified nucleotide with phosphorothioate linkage
  modified_base 20: mod_base = OTHER; note = 2'-O-methoxyethyl modified nucleotide with phosphorothioate linkage
  modified_base 21: mod_base = OTHER; note = 2'-O-methoxyethyl thymine
  misc_feature 1..8: note = RNA
  misc_feature 9..18: note = DNA
  misc_feature 19..21: note = RNA
cgtgcagaggtgaagcgaagt

SEQ ID NO: 860 - DNA, 21 bp, synthetic construct
  source 1..21: mol_type = other DNA
  modified_base 1: mod_base = OTHER; note = 2'-O-methoxyethyl modified nucleotide with phosphorothioate linkage
  modified_base 2: mod_base = OTHER; note = 2'-O-methoxyethyl 5-methylcytosine with phosphorothioate linkage
  modified_base 3: mod_base = OTHER; note = 2'-O-methoxyethyl modified nucleotide with phosphorothioate linkage
  modified_base 4: mod_base = OTHER; note = 2'-O-methoxyethyl modified thymine with phosphorothioate linkage
  modified_base 5: mod_base = OTHER; note = 2'-O-methoxyethyl modified nucleotide with phosphorothioate linkage
  modified_base 6: mod_base = OTHER; note = 2'-O-methoxyethyl 5-methylcytosine with phosphorothioate linkage
  modified_base 7: mod_base = OTHER; note = 2'-O-methoxyethyl modified nucleotide with phosphorothioate linkage
  modified_base 8: mod_base = OTHER; note = 2'-O-methoxyethyl modified nucleotide with phosphorothioate linkage
  modified_base 9: mod_base = OTHER; note = 2'-O-methoxyethyl modified nucleotide with phosphorothioate linkage
  modified_base 10: mod_base = OTHER; note = Nucleotide with phosphorothioate linkage
  modified_base 11: mod_base = OTHER; note = Nucleotide with phosphorothioate linkage
  modified_base 12: mod_base = OTHER; note = Thymine with phosphorothioate linkage
  modified_base 13: mod_base = OTHER; note = Nucleotide with phosphorothioate linkage
  modified_base 14: mod_base = OTHER; note = Nucleotide with phosphorothioate linkage
  modified_base 15: mod_base = OTHER; note = Nucleotide with phosphorothioate linkage
  modified_base 16: mod_base = OTHER; note = Nucleotide with phosphorothioate linkage
  modified_base 17: mod_base = OTHER; note = 5-methylcytosine with phosphorothioate linkage
  modified_base 18: mod_base = OTHER; note = Nucleotide with phosphorothioate linkage
  modified_base 19: mod_base = OTHER; note = Nucleotide with phosphorothioate linkage
  modified_base 20: mod_base = OTHER; note = 2'-O-methoxyethyl modified nucleotide with phosphorothioate linkage
  modified_base 21: mod_base = OTHER; note = 2'-O-methoxyethyl modified nucleotide
  misc_feature 1..9: note = RNA
  misc_feature 10..19: note = DNA
  misc_feature 20..21: note = RNA
acgtgcagaggtgaagcgaag

SEQ ID NO: 861 - DNA, 21 bp, synthetic construct
  source 1..21: mol_type = other DNA
  modified_base 1: mod_base = OTHER; note = Nucleotide with phosphorothioate linkage
  modified_base 2: mod_base = OTHER; note = Nucleotide with phosphorothioate linkage
  modified_base 3: mod_base = OTHER; note = Thymine with phosphorothioate linkage
  modified_base 4: mod_base = OTHER; note = Nucleotide with phosphorothioate linkage
  modified_base 5: mod_base = OTHER; note = 2'-O-methoxyethyl modified nucleotide with phosphorothioate linkage
  modified_base 6: mod_base = OTHER; note = Nucleotide with phosphorothioate linkage
  modified_base 7: mod_base = OTHER; note = Nucleotide with phosphorothioate linkage
  modified_base 8: mod_base = OTHER; note = 5-methylcytosine with phosphorothioate linkage
  modified_base 9: mod_base = OTHER; note = Nucleotide with phosphorothioate linkage
  modified_base 10: mod_base = OTHER; note = Nucleotide with phosphorothioate linkage
  modified_base 11: mod_base = OTHER; note = 2'-O-methoxyethyl modified nucleotide with phosphorothioate linkage
  modified_base 12: mod_base = OTHER; note = 2'-O-methoxyethyl modified nucleotide with phosphorothioate linkage
  modified_base 13: mod_base = OTHER; note = 2'-O-methoxyethyl modified thymine with phosphorothioate linkage
  modified_base 14: mod_base = OTHER; note = 2'-O-methoxyethyl modified nucleotide with phosphorothioate linkage
  modified_base 15: mod_base = OTHER; note = 2'-O-methoxyethyl 5-methylcytosine with phosphorothioate linkage
  modified_base 16: mod_base = OTHER; note = 2'-O-methoxyethyl modified nucleotide with phosphorothioate linkage
  modified_base 17: mod_base = OTHER; note = 2'-O-methoxyethyl 5-methylcytosine with phosphorothioate linkage
  modified_base 18: mod_base = OTHER; note = 2'-O-methoxyethyl modified nucleotide with phosphorothioate linkage
  modified_base 19: mod_base = OTHER; note = 2'-O-methoxyethyl modified nucleotide with phosphorothioate linkage
  modified_base 20: mod_base = OTHER; note = 2'-O-methoxyethyl modified nucleotide with phosphorothioate linkage
  modified_base 21: mod_base = OTHER; note = 2'-O-methoxyethyl modified nucleotide
  misc_feature 1..4: note = DNA
  misc_feature 5: note = RNA
  misc_feature 6..10: note = DNA
  misc_feature 11..21: note = RNA
ggtgaagcgaagtgcacaaga

SEQ ID NO: 862 - DNA, 21 bp, synthetic construct
  source 1..21: mol_type = other DNA
  modified_base 1: mod_base = OTHER; note = 2'-O-methoxyethyl modified nucleotide with phosphorothioate linkage
  modified_base 2: mod_base = OTHER; note = Nucleotide with phosphorothioate linkage
  modified_base 3: mod_base = OTHER; note = Nucleotide with phosphorothioate linkage
  modified_base 4: mod_base = OTHER; note = Thymine with phosphorothioate linkage
  modified_base 5: mod_base = OTHER; note = Nucleotide with phosphorothioate linkage
  modified_base 6: mod_base = OTHER; note = 2'-O-methoxyethyl modified nucleotide with phosphorothioate linkage
  modified_base 7: mod_base = OTHER; note = Nucleotide with phosphorothioate linkage
  modified_base 8: mod_base = OTHER; note = Nucleotide with phosphorothioate linkage
  modified_base 9: mod_base = OTHER; note = 5-methylcytosine with phosphorothioate linkage
  modified_base 10: mod_base = OTHER; note = Nucleotide with phosphorothioate linkage
  modified_base 11: mod_base = OTHER; note = Nucleotide with phosphorothioate linkage
  modified_base 12: mod_base = OTHER; note = 2'-O-methoxyethyl modified nucleotide with phosphorothioate linkage
  modified_base 13: mod_base = OTHER; note = 2'-O-methoxyethyl modified nucleotide with phosphorothioate linkage
  modified_base 14: mod_base = OTHER; note = 2'-O-methoxyethyl modified thymine with phosphorothioate linkage
  modified_base 15: mod_base = OTHER; note = 2'-O-methoxyethyl modified nucleotide with phosphorothioate linkage
  modified_base 16: mod_base = OTHER; note = 2'-O-methoxyethyl 5-methylcytosine with phosphorothioate linkage
  modified_base 17: mod_base = OTHER; note = 2'-O-methoxyethyl modified nucleotide with phosphorothioate linkage
  modified_base 18: mod_base = OTHER; note = 2'-O-methoxyethyl 5-methylcytosine with phosphorothioate linkage
  modified_base 19: mod_base = OTHER; note = 2'-O-methoxyethyl modified nucleotide with phosphorothioate linkage
  modified_base 20: mod_base = OTHER; note = 2'-O-methoxyethyl modified nucleotide with phosphorothioate linkage
  modified_base 21: mod_base = OTHER; note = 2'-O-methoxyethyl modified nucleotide
  misc_feature 1: note = RNA
  misc_feature 2..5: note = DNA
  misc_feature 6: note = RNA
  misc_feature 7..11: note = DNA
  misc_feature 12..21: note = RNA
aggtgaagcgaagtgcacaag

SEQ ID NO: 863 - DNA, 21 bp, synthetic construct
  source 1..21: mol_type = other DNA
  modified_base 1: mod_base = OTHER; note = 2'-O-methoxyethyl modified nucleotide with phosphorothioate linkage
  modified_base 2: mod_base = OTHER; note = 2'-O-methoxyethyl modified nucleotide with phosphorothioate linkage
  modified_base 3: mod_base = OTHER; note = Nucleotide with phosphorothioate linkage
  modified_base 4: mod_base = OTHER; note = Nucleotide with phosphorothioate linkage
  modified_base 5: mod_base = OTHER; note = Thymine with phosphorothioate linkage
  modified_base 6: mod_base = OTHER; note = Nucleotide with phosphorothioate linkage
  modified_base 7: mod_base = OTHER; note = 2'-O-methoxyethyl modified nucleotide with phosphorothioate linkage
  modified_base 8: mod_base = OTHER; note = Nucleotide with phosphorothioate linkage
  modified_base 9: mod_base = OTHER; note = Nucleotide with phosphorothioate linkage
  modified_base 10: mod_base = OTHER; note = 5-methylcytosine with phosphorothioate linkage
  modified_base 11: mod_base = OTHER; note = Nucleotide with phosphorothioate linkage
  modified_base 12: mod_base = OTHER; note = Nucleotide with phosphorothioate linkage
  modified_base 13: mod_base = OTHER; note = 2'-O-methoxyethyl modified nucleotide with phosphorothioate linkage
  modified_base 14: mod_base = OTHER; note = 2'-O-methoxyethyl modified nucleotide with phosphorothioate linkage
  modified_base 15: mod_base = OTHER; note = 2'-O-methoxyethyl modified thymine with phosphorothioate linkage
  modified_base 16: mod_base = OTHER; note = 2'-O-methoxyethyl modified nucleotide with phosphorothioate linkage
  modified_base 17: mod_base = OTHER; note = 2'-O-methoxyethyl 5-methylcytosine with phosphorothioate linkage
  modified_base 18: mod_base = OTHER; note = 2'-O-methoxyethyl modified nucleotide with phosphorothioate linkage
  modified_base 19: mod_base = OTHER; note = 2'-O-methoxyethyl 5-methylcytosine with phosphorothioate linkage
  modified_base 20: mod_base = OTHER; note = 2'-O-methoxyethyl modified nucleotide with phosphorothioate linkage
  modified_base 21: mod_base = OTHER; note = 2'-O-methoxyethyl modified nucleotide
  misc_feature 1..2: note = RNA
  misc_feature 3..6: note = DNA
  misc_feature 7: note = RNA
  misc_feature 8..12: note = DNA
  misc_feature 13..21: note = RNA
gaggtgaagcgaagtgcacaa

SEQ ID NO: 864 - DNA, 21 bp, synthetic construct
  source 1..21: mol_type = other DNA
  modified_base 1: mod_base = OTHER; note = 2'-O-methoxyethyl modified nucleotide with phosphorothioate linkage
  modified_base 2: mod_base = OTHER; note = 2'-O-methoxyethyl modified nucleotide with phosphorothioate linkage
  modified_base 3: mod_base = OTHER; note = 2'-O-methoxyethyl modified nucleotide with phosphorothioate linkage
  modified_base 4: mod_base = OTHER; note = Nucleotide with phosphorothioate linkage
  modified_base 5: mod_base = OTHER; note = Nucleotide with phosphorothioate linkage
  modified_base 6: mod_base = OTHER; note = Thymine with phosphorothioate linkage
  modified_base 7: mod_base = OTHER; note = Nucleotide with phosphorothioate linkage
  modified_base 8: mod_base = OTHER; note = 2'-O-methoxyethyl modified nucleotide with phosphorothioate linkage
  modified_base 9: mod_base = OTHER; note = Nucleotide with phosphorothioate linkage
  modified_base 10: mod_base = OTHER; note = Nucleotide with phosphorothioate linkage
  modified_base 11: mod_base = OTHER; note = 5-methylcytosine with phosphorothioate linkage
  modified_base 12: mod_base = OTHER; note = Nucleotide with phosphorothioate linkage
  modified_base 13: mod_base = OTHER; note = Nucleotide with phosphorothioate linkage
  modified_base 14: mod_base = OTHER; note = 2'-O-methoxyethyl modified nucleotide with phosphorothioate linkage
  modified_base 15: mod_base = OTHER; note = 2'-O-methoxyethyl modified nucleotide with phosphorothioate linkage
  modified_base 16: mod_base = OTHER; note = 2'-O-methoxyethyl modified thymine with phosphorothioate linkage
  modified_base 17: mod_base = OTHER; note = 2'-O-methoxyethyl modified nucleotide with phosphorothioate linkage
  modified_base 18: mod_base = OTHER; note = 2'-O-methoxyethyl 5-methylcytosine with phosphorothioate linkage
  modified_base 19: mod_base = OTHER; note = 2'-O-methoxyethyl modified nucleotide with phosphorothioate linkage
  modified_base 20: mod_base = OTHER; note = 2'-O-methoxyethyl 5-methylcytosine with phosphorothioate linkage
  modified_base 21: mod_base = OTHER; note = 2'-O-methoxyethyl modified nucleotide
  misc_feature 1..3: note = RNA
  misc_feature 4..7: note = DNA
  misc_feature 8: note = RNA
  misc_feature 9..13: note = DNA
  misc_feature 14..21: note = RNA
agaggtgaagcgaagtgcaca

SEQ ID NO: 865 - DNA, 21 bp, synthetic construct
  source 1..21: mol_type = other DNA
  modified_base 1: mod_base = OTHER; note = 2'-O-methoxyethyl 5-methylcytosine with phosphorothioate linkage
  modified_base 2: mod_base = OTHER; note = 2'-O-methoxyethyl modified nucleotide with phosphorothioate linkage
  modified_base 3: mod_base = OTHER; note = 2'-O-methoxyethyl modified nucleotide with phosphorothioate linkage
  modified_base 4: mod_base = OTHER; note = 2'-O-methoxyethyl modified nucleotide with phosphorothioate linkage
  modified_base 5: mod_base = OTHER; note = Nucleotide with phosphorothioate linkage
  modified_base 6: mod_base = OTHER; note = Nucleotide with phosphorothioate linkage
  modified_base 7: mod_base = OTHER; note = Thymine with phosphorothioate linkage
  modified_base 8: mod_base = OTHER; note = Nucleotide with phosphorothioate linkage
  modified_base 9: mod_base = OTHER; note = 2'-O-methoxyethyl modified nucleotide with phosphorothioate linkage
  modified_base 10: mod_base = OTHER; note = Nucleotide with phosphorothioate linkage
  modified_base 11: mod_base = OTHER; note = Nucleotide with phosphorothioate linkage
  modified_base 12: mod_base = OTHER; note = 5-methylcytosine with phosphorothioate linkage
  modified_base 13: mod_base = OTHER; note = Nucleotide with phosphorothioate linkage
  modified_base 14: mod_base = OTHER; note = Nucleotide with phosphorothioate linkage
  modified_base 15: mod_base = OTHER; note = 2'-O-methoxyethyl modified nucleotide with phosphorothioate linkage
  modified_base 16: mod_base = OTHER; note = 2'-O-methoxyethyl modified nucleotide with phosphorothioate linkage
  modified_base 17: mod_base = OTHER; note = 2'-O-methoxyethyl modified thymine with phosphorothioate linkage
  modified_base 18: mod_base = OTHER; note = 2'-O-methoxyethyl modified nucleotide with phosphorothioate linkage
  modified_base 19: mod_base = OTHER; note = 2'-O-methoxyethyl 5-methylcytosine with phosphorothioate linkage
  modified_base 20: mod_base = OTHER; note = 2'-O-methoxyethyl modified nucleotide with phosphorothioate linkage
  modified_base 21: mod_base = OTHER; note = 2'-O-methoxyethyl 5-methylcytosine
  misc_feature 1..4: note = RNA
  misc_feature 5..8: note = DNA
  misc_feature 9: note = RNA
  misc_feature 10..14: note = DNA
  misc_feature 15..21: note = RNA
cagaggtgaagcgaagtgcac

SEQ ID NO: 866 - DNA, 21 bp, synthetic construct
  source 1..21: mol_type = other DNA
  modified_base 1: mod_base = OTHER; note = 2'-O-methoxyethyl modified nucleotide with phosphorothioate linkage
  modified_base 2: mod_base = OTHER; note = 2'-O-methoxyethyl 5-methylcytosine with phosphorothioate linkage
  modified_base 3: mod_base = OTHER; note = 2'-O-methoxyethyl modified nucleotide with phosphorothioate linkage
  modified_base 4: mod_base = OTHER; note = 2'-O-methoxyethyl modified nucleotide with phosphorothioate linkage
  modified_base 5: mod_base = OTHER; note = 2'-O-methoxyethyl modified nucleotide with phosphorothioate linkage
  modified_base 6: mod_base = OTHER; note = Nucleotide with phosphorothioate linkage
  modified_base 7: mod_base = OTHER; note = Nucleotide with phosphorothioate linkage
  modified_base 8: mod_base = OTHER; note = Thymine with phosphorothioate linkage
  modified_base 9: mod_base = OTHER; note = Nucleotide with phosphorothioate linkage
  modified_base 10: mod_base = OTHER; note = 2'-O-methoxyethyl modified nucleotide with phosphorothioate linkage
  modified_base 11: mod_base = OTHER; note = Nucleotide with phosphorothioate linkage
  modified_base 12: mod_base = OTHER; note = Nucleotide with phosphorothioate linkage
  modified_base 13: mod_base = OTHER; note = 5-methylcytosine with phosphorothioate linkage
  modified_base 14: mod_base = OTHER; note = Nucleotide with phosphorothioate linkage
  modified_base 15: mod_base = OTHER; note = Nucleotide with phosphorothioate linkage
  modified_base 16: mod_base = OTHER; note = 2'-O-methoxyethyl modified nucleotide with phosphorothioate linkage
  modified_base 17: mod_base = OTHER; note = 2'-O-methoxyethyl modified nucleotide with phosphorothioate linkage
  modified_base 18: mod_base = OTHER; note = 2'-O-methoxyethyl modified thymine with phosphorothioate linkage
  modified_base 19: mod_base = OTHER; note = 2'-O-methoxyethyl modified nucleotide with phosphorothioate linkage
  modified_base 20: mod_base = OTHER; note = 2'-O-methoxyethyl 5-methylcytosine with phosphorothioate linkage
  modified_base 21: mod_base = OTHER; note = 2'-O-methoxyethyl modified nucleotide
  misc_feature 1..5: note = RNA
  misc_feature 6..9: note = DNA
  misc_feature 10: note = RNA
  misc_feature 11..15: note = DNA
  misc_feature 16..21: note = RNA
gcagaggtgaagcgaagtgca

SEQ ID NO: 867 - DNA, 21 bp, synthetic construct
  source 1..21: mol_type = other DNA
  modified_base 1: mod_base = OTHER; note = 2'-O-methoxyethyl modified thymine with phosphorothioate linkage
  modified_base 2: mod_base = OTHER; note = 2'-O-methoxyethyl modified nucleotide with phosphorothioate linkage
  modified_base 3: mod_base = OTHER; note = 2'-O-methoxyethyl 5-methylcytosine with phosphorothioate linkage
  modified_base 4: mod_base = OTHER; note = 2'-O-methoxyethyl modified nucleotide with phosphorothioate linkage
  modified_base 5: mod_base = OTHER; note = 2'-O-methoxyethyl modified nucleotide with phosphorothioate linkage
  modified_base 6: mod_base = OTHER; note = 2'-O-methoxyethyl modified nucleotide with phosphorothioate linkage
  modified_base 7: mod_base = OTHER; note = Nucleotide with phosphorothioate linkage
  modified_base 8: mod_base = OTHER; note = Nucleotide with phosphorothioate linkage
  modified_base 9: mod_base = OTHER; note = Thymine with phosphorothioate linkage
  modified_base 10: mod_base = OTHER; note = Nucleotide with phosphorothioate linkage
  modified_base 11: mod_base = OTHER; note = 2'-O-methoxyethyl modified nucleotide with phosphorothioate linkage
  modified_base 12: mod_base = OTHER; note = Nucleotide with phosphorothioate linkage
  modified_base 13: mod_base = OTHER; note = Nucleotide with phosphorothioate linkage
  modified_base 14: mod_base = OTHER; note = 5-methylcytosine with phosphorothioate linkage
  modified_base 15: mod_base = OTHER; note = Nucleotide with phosphorothioate linkage
  modified_base 16: mod_base = OTHER; note = Nucleotide with phosphorothioate linkage
  modified_base 17: mod_base = OTHER; note = 2'-O-methoxyethyl modified nucleotide with phosphorothioate linkage
  modified_base 18: mod_base = OTHER; note = 2'-O-methoxyethyl modified nucleotide with phosphorothioate linkage
  modified_base 19: mod_base = OTHER; note = 2'-O-methoxyethyl modified thymine with phosphorothioate linkage
  modified_base 20: mod_base = OTHER; note = 2'-O-methoxyethyl modified nucleotide with phosphorothioate linkage
  modified_base 21: mod_base = OTHER; note = 2'-O-methoxyethyl 5-methylcytosine
  misc_feature 1..6: note = RNA
  misc_feature 7..10: note = DNA
  misc_feature 11: note = RNA
  misc_feature 12..16: note = DNA
  misc_feature 17..21: note = RNA
tgcagaggtgaagcgaagtgc

SEQ ID NO: 868 - DNA, 21 bp, synthetic construct
  source 1..21: mol_type = other DNA
  modified_base 1: mod_base = OTHER; note = 2'-O-methoxyethyl modified nucleotide with phosphorothioate linkage
  modified_base 2: mod_base = OTHER; note = 2'-O-methoxyethyl modified thymine with phosphorothioate linkage
  modified_base 3: mod_base = OTHER; note = 2'-O-methoxyethyl modified nucleotide with phosphorothioate linkage
  modified_base 4: mod_base = OTHER; note = 2'-O-methoxyethyl 5-methylcytosine with phosphorothioate linkage
  modified_base 5: mod_base = OTHER; note = 2'-O-methoxyethyl modified nucleotide with phosphorothioate linkage
  modified_base 6: mod_base = OTHER; note = 2'-O-methoxyethyl modified nucleotide with phosphorothioate linkage
  modified_base 7: mod_base = OTHER; note = 2'-O-methoxyethyl modified nucleotide with phosphorothioate linkage
  modified_base 8: mod_base = OTHER; note = Nucleotide with phosphorothioate linkage
  modified_base 9: mod_base = OTHER; note = Nucleotide with phosphorothioate linkage
  modified_base 10: mod_base = OTHER; note = Thymine with phosphorothioate linkage
  modified_base 11: mod_base = OTHER; note = Nucleotide with phosphorothioate linkage
  modified_base 12: mod_base = OTHER; note = 2'-O-methoxyethyl modified nucleotide with phosphorothioate linkage
  modified_base 13: mod_base = OTHER; note = Nucleotide with phosphorothioate linkage
  modified_base 14: mod_base = OTHER; note = Nucleotide with phosphorothioate linkage
  modified_base 15: mod_base = OTHER; note = 5-methylcytosine with phosphorothioate linkage
  modified_base 16: mod_base = OTHER; note = Nucleotide with phosphorothioate linkage
  modified_base 17: mod_base = OTHER; note = Nucleotide with phosphorothioate linkage
  modified_base 18: mod_base = OTHER; note = 2'-O-methoxyethyl modified nucleotide with phosphorothioate linkage
  modified_base 19: mod_base = OTHER; note = 2'-O-methoxyethyl modified nucleotide with phosphorothioate linkage
  modified_base 20: mod_base = OTHER; note = 2'-O-methoxyethyl modified thymine with phosphorothioate linkage
  modified_base 21: mod_base = OTHER; note = 2'-O-methoxyethyl modified nucleotide
  misc_feature 1..7: note = RNA
  misc_feature 8..11: note = DNA
  misc_feature 12: note = RNA
  misc_feature 13..17: note = DNA
  misc_feature 18..21: note = RNA
gtgcagaggtgaagcgaagtg

SEQ ID NO: 869 - DNA, 21 bp, synthetic construct
  source 1..21: mol_type = other DNA
  modified_base 1: mod_base = OTHER; note = 2'-O-methoxyethyl 5-methylcytosine with phosphorothioate linkage
  modified_base 2: mod_base = OTHER; note = 2'-O-methoxyethyl modified nucleotide with phosphorothioate linkage
  modified_base 3: mod_base = OTHER; note = 2'-O-methoxyethyl modified thymine with phosphorothioate linkage
  modified_base 4: mod_base = OTHER; note = 2'-O-methoxyethyl modified nucleotide with phosphorothioate linkage
  modified_base 5: mod_base = OTHER; note = 2'-O-methoxyethyl 5-methylcytosine with phosphorothioate linkage
  modified_base 6: mod_base = OTHER; note = 2'-O-methoxyethyl modified nucleotide with phosphorothioate linkage
  modified_base 7: mod_base = OTHER; note = 2'-O-methoxyethyl modified nucleotide with phosphorothioate linkage
  modified_base 8: mod_base = OTHER; note = 2'-O-methoxyethyl modified nucleotide with phosphorothioate linkage
  modified_base 9: mod_base = OTHER; note = Nucleotide with phosphorothioate linkage
  modified_base 10: mod_base = OTHER; note = Nucleotide with phosphorothioate linkage
  modified_base 11: mod_base = OTHER; note = Thymine with phosphorothioate linkage
  modified_base 12: mod_base = OTHER; note = Nucleotide with phosphorothioate linkage
  modified_base 13: mod_base = OTHER; note = 2'-O-methoxyethyl modified nucleotide with phosphorothioate linkage
  modified_base 14: mod_base = OTHER; note = Nucleotide with phosphorothioate linkage
  modified_base 15: mod_base = OTHER; note = Nucleotide with phosphorothioate linkage
  modified_base 16: mod_base = OTHER; note = 5-methylcytosine with phosphorothioate linkage
  modified_base 17: mod_base = OTHER; note = Nucleotide with phosphorothioate linkage
  modified_base 18: mod_base = OTHER; note = Nucleotide with phosphorothioate linkage
  modified_base 19: mod_base = OTHER; note = 2'-O-methoxyethyl modified nucleotide with phosphorothioate linkage
  modified_base 20: mod_base = OTHER; note = 2'-O-methoxyethyl modified nucleotide with phosphorothioate linkage
  modified_base 21: mod_base = OTHER; note = 2'-O-methoxyethyl thymine
  misc_feature 1..8: note = RNA
  misc_feature 9..12: note = DNA
  misc_feature 13: note = RNA
  misc_feature 14..18: note = DNA
  misc_feature 19..21: note = RNA
cgtgcagaggtgaagcgaagt

SEQ ID NO: 870 - DNA, 21 bp, synthetic construct
  source 1..21: mol_type = other DNA
  modified_base 1: mod_base = OTHER; note = 2'-O-methoxyethyl modified nucleotide with phosphorothioate linkage
  modified_base 2: mod_base = OTHER; note = 2'-O-methoxyethyl 5-methylcytosine with phosphorothioate linkage
  modified_base 3: mod_base = OTHER; note = 2'-O-methoxyethyl modified nucleotide with phosphorothioate linkage
  modified_base 4: mod_base = OTHER; note = 2'-O-methoxyethyl modified thymine with phosphorothioate linkage
  modified_base 5: mod_base = OTHER; note = 2'-O-methoxyethyl modified nucleotide with phosphorothioate linkage
  modified_base 6: mod_base = OTHER; note = 2'-O-methoxyethyl 5-methylcytosine with phosphorothioate linkage
  modified_base 7: mod_base = OTHER; note = 2'-O-methoxyethyl modified nucleotide with phosphorothioate linkage
  modified_base 8: mod_base = OTHER; note = 2'-O-methoxyethyl modified nucleotide with phosphorothioate linkage
  modified_base 9: mod_base = OTHER; note = 2'-O-methoxyethyl modified nucleotide with phosphorothioate linkage
  modified_base 10: mod_base = OTHER; note = Nucleotide with phosphorothioate linkage
  modified_base 11: mod_base = OTHER; note = Nucleotide with phosphorothioate linkage
  modified_base 12: mod_base = OTHER; note = Thymine with phosphorothioate linkage
  modified_base 13: mod_base = OTHER; note = Nucleotide with phosphorothioate linkage
  modified_base 14: mod_base = OTHER; note = 2'-O-methoxyethyl modified nucleotide with phosphorothioate linkage
  modified_base 15: mod_base = OTHER; note = Nucleotide with phosphorothioate linkage
  modified_base 16: mod_base = OTHER; note = Nucleotide with phosphorothioate linkage
  modified_base 17: mod_base = OTHER; note = 5-methylcytosine with phosphorothioate linkage
  modified_base 18: mod_base = OTHER; note = Nucleotide with phosphorothioate linkage
  modified_base 19: mod_base = OTHER; note = Nucleotide with phosphorothioate linkage
  modified_base 20: mod_base = OTHER; note = 2'-O-methoxyethyl modified nucleotide with phosphorothioate linkage
  modified_base 21: mod_base = OTHER; note = 2'-O-methoxyethyl modified nucleotide
  misc_feature 1..9: note = RNA
  misc_feature 10..13: note = DNA
  misc_feature 14: note = RNA
  misc_feature 15..19: note = DNA
  misc_feature 20..21: note = RNA
acgtgcagaggtgaagcgaag

SEQ ID NO: 871 - DNA, 21 bp, synthetic construct
  source 1..21: mol_type = other DNA
  modified_base 1: mod_base = OTHER; note = 2'-O-methoxyethyl 5-methylcytosine with phosphorothioate linkage
  modified_base 2: mod_base = OTHER; note = 2'-O-methoxyethyl modified nucleotide with phosphorothioate linkage
  modified_base 3: mod_base = OTHER; note = 2'-O-methoxyethyl modified nucleotide with phosphorothioate linkage
  modified_base 4: mod_base = OTHER; note = 2'-O-methoxyethyl modified nucleotide with phosphorothioate linkage
  modified_base 5: mod_base = OTHER; note = 2'-O-methoxyethyl modified nucleotide with phosphorothioate linkage
  modified_base 6: mod_base = OTHER; note = Nucleotide with phosphorothioate linkage
  modified_base 7: mod_base = OTHER; note = Thymine with phosphorothioate linkage
  modified_base 8: mod_base = OTHER; note = Nucleotide with phosphorothioate linkage
  modified_base 9: mod_base = OTHER; note = Nucleotide with phosphorothioate linkage
  modified_base 10: mod_base = OTHER; note = Nucleotide with phosphorothioate linkage
  modified_base 11: mod_base = OTHER; note = Nucleotide with phosphorothioate linkage
  modified_base 12: mod_base = OTHER; note = 5-methylcytosine with phosphorothioate linkage
  modified_base 13: mod_base = OTHER; note = Nucleotide with phosphorothioate linkage
  modified_base 14: mod_base = OTHER; note = Nucleotide with phosphorothioate linkage
  modified_base 15: mod_base = OTHER; note = Nucleotide with phosphorothioate linkage
  modified_base 16: mod_base = OTHER; note = 2'-O-methoxyethyl modified nucleotide with phosphorothioate linkage
  modified_base 17: mod_base = OTHER; note = 2'-O-methoxyethyl modified thymine with phosphorothioate linkage
  modified_base 18: mod_base = OTHER; note = 2'-O-methoxyethyl modified nucleotide with phosphorothioate linkage
  modified_base 19: mod_base = OTHER; note = 2'-O-methoxyethyl 5-methylcytosine with phosphorothioate linkage
  modified_base 20: mod_base = OTHER; note = 2'-O-methoxyethyl modified nucleotide with phosphorothioate linkage
  modified_base 21: mod_base = OTHER; note = 2'-O-methoxyethyl 5-methylcytosine
  misc_feature 1..5: note = RNA
  misc_feature 6..15: note = DNA
  misc_feature 16..21: note = RNA
cagaggtgaagcgaagtgcac

SEQ ID NO: 872 - DNA, 21 bp, synthetic construct
  source 1..21: mol_type = other DNA
  modified_base 1: mod_base = OTHER; note = 2'-O-methoxyethyl 5-methylcytosine with phosphorothioate linkage
  modified_base 2: mod_base = OTHER; note = 2'-O-methoxyethyl modified nucleotide with phosphorothioate linkage
  modified_base 3: mod_base = OTHER; note = 2'-O-methoxyethyl modified nucleotide with phosphorothioate linkage
  modified_base 4: mod_base = OTHER; note = 2'-O-methoxyethyl modified nucleotide with phosphorothioate linkage
  modified_base 5: mod_base = OTHER; note = 2'-O-methoxyethyl modified nucleotide with phosphorothioate linkage
  modified_base 6: mod_base = OTHER; note = Nucleotide with phosphorothioate linkage
  modified_base 7: mod_base = OTHER; note = Thymine with phosphorothioate linkage
  modified_base 8: mod_base = OTHER; note = Nucleotide with phosphorothioate linkage
  modified_base 9: mod_base = OTHER; note = Nucleotide with phosphorothioate linkage
  modified_base 10: mod_base = OTHER; note = Nucleotide with phosphorothioate linkage
  modified_base 11: mod_base = OTHER; note = Nucleotide with phosphorothioate linkage
  modified_base 12: mod_base = OTHER; note = 5-methylcytosine with phosphorothioate linkage
  modified_base 13: mod_base = OTHER; note = Nucleotide with phosphorothioate linkage
  modified_base 14: mod_base = OTHER; note = Nucleotide with phosphorothioate linkage
  modified_base 15: mod_base = OTHER; note = 2'-O-methoxyethyl modified nucleotide with phosphorothioate linkage
  modified_base 16: mod_base = OTHER; note = 2'-O-methoxyethyl modified nucleotide with phosphorothioate linkage
  modified_base 17: mod_base = OTHER; note = 2'-O-methoxyethyl modified thymine with phosphorothioate linkage
  modified_base 18: mod_base = OTHER; note = 2'-O-methoxyethyl modified nucleotide with phosphorothioate linkage
  modified_base 19: mod_base = OTHER; note = 2'-O-methoxyethyl 5-methylcytosine with phosphorothioate linkage
  modified_base 20: mod_base = OTHER; note = 2'-O-methoxyethyl modified nucleotide with phosphorothioate linkage
  modified_base 21: mod_base = OTHER; note = 2'-O-methoxyethyl 5-methylcytosine
  misc_feature 1..5: note = RNA
  misc_feature 6..14: note = DNA
  misc_feature 15..21: note = RNA
cagaggtgaagcgaagtgcac

SEQ ID NO: 873 - DNA, 21 bp, synthetic construct
  source 1..21: mol_type = other DNA
  modified_base 1: mod_base = OTHER; note = 2'-O-methoxyethyl 5-methylcytosine with phosphorothioate linkage
  modified_base 2: mod_base = OTHER; note = 2'-O-methoxyethyl modified nucleotide with phosphorothioate linkage
  modified_base 3: mod_base = OTHER; note = 2'-O-methoxyethyl modified nucleotide with phosphorothioate linkage
  modified_base 4: mod_base = OTHER; note = 2'-O-methoxyethyl modified nucleotide with phosphorothioate linkage
  modified_base 5: mod_base = OTHER; note = 2'-O-methoxyethyl modified nucleotide with phosphorothioate linkage
  modified_base 6: mod_base = OTHER; note = 2'-O-methoxyethyl modified nucleotide with phosphorothioate linkage
  modified_base 7: mod_base = OTHER; note = Thymine with phosphorothioate linkage
  modified_base 8: mod_base = OTHER; note = Nucleotide with phosphorothioate linkage
  modified_base 9: mod_base = OTHER; note = Nucleotide with phosphorothioate linkage
  modified_base 10: mod_base = OTHER; note = Nucleotide with phosphorothioate linkage
  modified_base 11: mod_base = OTHER; note = Nucleotide with phosphorothioate linkage
  modified_base 12: mod_base = OTHER; note = 5-methylcytosine with phosphorothioate linkage
  modified_base 13: mod_base = OTHER; note = Nucleotide with phosphorothioate linkage
  modified_base 14: mod_base = OTHER; note = Nucleotide with phosphorothioate linkage
  modified_base 15: mod_base = OTHER; note = Nucleotide with phosphorothioate linkage
  modified_base 16: mod_base = OTHER; note = Nucleotide with phosphorothioate linkage
  modified_base 17: mod_base = OTHER; note = 2'-O-methoxyethyl modified thymine with phosphorothioate linkage
  modified_base 18: mod_base = OTHER; note = 2'-O-methoxyethyl modified nucleotide with phosphorothioate linkage
  modified_base 19: mod_base = OTHER; note = 2'-O-methoxyethyl 5-methylcytosine with phosphorothioate linkage
  modified_base 20: mod_base = OTHER; note = 2'-O-methoxyethyl modified nucleotide with phosphorothioate linkage
  modified_base 21: mod_base = OTHER; note = 2'-O-methoxyethyl 5-methylcytosine
  misc_feature 1..6: note = RNA
  misc_feature 7..16: note = DNA
  misc_feature 17..21: note = RNA
cagaggtgaagcgaagtgcac

SEQ ID NO: 874 - DNA, 21 bp, synthetic construct
  source 1..21: mol_type = other DNA
  modified_base 1: mod_base = OTHER; note = 2'-O-methoxyethyl 5-methylcytosine with phosphorothioate linkage
  modified_base 2: mod_base = OTHER; note = 2'-O-methoxyethyl modified nucleotide with phosphorothioate linkage
  modified_base 3: mod_base = OTHER; note = 2'-O-methoxyethyl modified nucleotide with phosphorothioate linkage
  modified_base 4: mod_base = OTHER; note = 2'-O-methoxyethyl modified nucleotide with phosphorothioate linkage
  modified_base 5: mod_base = OTHER; note = Nucleotide with phosphorothioate linkage
  modified_base 6: mod_base = OTHER; note = Nucleotide with phosphorothioate linkage
  modified_base 7: mod_base = OTHER; note = Thymine with phosphorothioate linkage
  modified_base 8: mod_base = OTHER; note = Nucleotide with phosphorothioate linkage
  modified_base 9: mod_base = OTHER; note = Nucleotide with phosphorothioate linkage
  modified_base 10: mod_base = OTHER; note = Nucleotide with phosphorothioate linkage
  modified_base 11: mod_base = OTHER; note = Nucleotide with phosphorothioate linkage
  modified_base 12: mod_base = OTHER; note = 5-methylcytosine with phosphorothioate linkage
  modified_base 13: mod_base = OTHER; note = Nucleotide with phosphorothioate linkage
  modified_base 14: mod_base = OTHER; note = 2'-O-methoxyethyl modified nucleotide with phosphorothioate linkage
  modified_base 15: mod_base = OTHER; note = 2'-O-methoxyethyl modified nucleotide with phosphorothioate linkage
  modified_base 16: mod_base = OTHER; note = 2'-O-methoxyethyl modified nucleotide with phosphorothioate linkage
  modified_base 17: mod_base = OTHER; note = 2'-O-methoxyethyl modified thymine with phosphorothioate linkage
  modified_base 18: mod_base = OTHER; note = 2'-O-methoxyethyl modified nucleotide with phosphorothioate linkage
  modified_base 19: mod_base = OTHER; note = 2'-O-methoxyethyl 5-methylcytosine with phosphorothioate linkage
  modified_base 20: mod_base = OTHER; note = 2'-O-methoxyethyl modified nucleotide with phosphorothioate linkage
  modified_base 21: mod_base = OTHER; note = 2'-O-methoxyethyl 5-methylcytosine
  misc_feature 1..4: note = RNA
  misc_feature 5..13: note = DNA
  misc_feature 14..21: note = RNA
cagaggtgaagcgaagtgcac

SEQ ID NO: 875 - DNA, 21 bp, synthetic construct
  source 1..21: mol_type = other DNA
  modified_base 1: mod_base = OTHER; note = 2'-O-methoxyethyl 5-methylcytosine with phosphorothioate linkage
  modified_base 2: mod_base = OTHER; note = 2'-O-methoxyethyl modified nucleotide with phosphorothioate linkage
  modified_base 3: mod_base = OTHER; note = 2'-O-methoxyethyl modified nucleotide with phosphorothioate linkage
  modified_base 4: mod_base = OTHER; note = 2'-O-methoxyethyl modified nucleotide with phosphorothioate linkage
  modified_base 5: mod_base = OTHER; note = 2'-O-methoxyethyl modified nucleotide with phosphorothioate linkage
  modified_base 6: mod_base = OTHER; note = 2'-O-methoxyethyl modified nucleotide with phosphorothioate linkage
  modified_base 7: mod_base = OTHER; note = 2'-O-methoxyethyl modified thymine with phosphorothioate linkage
  modified_base 8: mod_base = OTHER; note = Nucleotide with phosphorothioate linkage
  modified_base 9: mod_base = OTHER; note = Nucleotide with phosphorothioate linkage
  modified_base 10: mod_base = OTHER; note = Nucleotide with phosphorothioate linkage
  modified_base 11: mod_base = OTHER; note = Nucleotide with phosphorothioate linkage
  modified_base 12: mod_base = OTHER; note = 5-methylcytosine with phosphorothioate linkage
  modified_base 13: mod_base = OTHER; note = Nucleotide with phosphorothioate linkage
  modified_base 14: mod_base = OTHER; note = Nucleotide with phosphorothioate linkage
  modified_base 15: mod_base = OTHER; note = Nucleotide with phosphorothioate linkage
  modified_base 16: mod_base = OTHER; note = Nucleotide with phosphorothioate linkage
  modified_base 17: mod_base = OTHER; note = Thymine with phosphorothioate linkage
  modified_base 18: mod_base = OTHER; note = 2'-O-methoxyethyl modified nucleotide with phosphorothioate linkage
  modified_base 19: mod_base = OTHER; note = 2'-O-methoxyethyl 5-methylcytosine with phosphorothioate linkage
  modified_base 20: mod_base = OTHER; note = 2'-O-methoxyethyl modified nucleotide with phosphorothioate linkage
  modified_base 21: mod_base = OTHER; note = 2'-O-methoxyethyl 5-methylcytosine
  misc_feature 1..7: note = RNA
  misc_feature 8..17: note = DNA
  misc_feature 18..21: note = RNA
cagaggtgaagcgaagtgcac

SEQ ID NO: 876 - DNA, 21 bp, synthetic construct
  source 1..21: mol_type = other DNA
  modified_base 1: mod_base = OTHER; note = 2'-O-methoxyethyl 5-methylcytosine with phosphorothioate linkage
  modified_base 2: mod_base = OTHER; note = 2'-O-methoxyethyl modified nucleotide with phosphorothioate linkage
  modified_base 3: mod_base = OTHER; note = 2'-O-methoxyethyl modified nucleotide with phosphorothioate linkage
  modified_base 4: mod_base = OTHER; note = 2'-O-methoxyethyl modified nucleotide with phosphorothioate linkage
  modified_base 5: mod_base = OTHER; note = 2'-O-methoxyethyl modified nucleotide with phosphorothioate linkage
  modified_base 6: mod_base = OTHER; note = 2'-O-methoxyethyl modified nucleotide with phosphorothioate linkage
  modified_base 7: mod_base = OTHER; note = Thymine with phosphorothioate linkage
  modified_base 8: mod_base = OTHER; note = Nucleotide with phosphorothioate linkage
  modified_base 9: mod_base = OTHER; note = Nucleotide with phosphorothioate linkage
  modified_base 10: mod_base = OTHER; note = Nucleotide with phosphorothioate linkage
  modified_base 11: mod_base = OTHER; note = Nucleotide with phosphorothioate linkage
  modified_base 12: mod_base = OTHER; note = 5-methylcytosine with phosphorothioate linkage
  modified_base 13: mod_base = OTHER; note = Nucleotide with phosphorothioate linkage
  modified_base 14: mod_base = OTHER; note = Nucleotide with phosphorothioate linkage
  modified_base 15: mod_base = OTHER; note = Nucleotide with phosphorothioate linkage
  modified_base 16: mod_base = OTHER; note = 2'-O-methoxyethyl modified nucleotide with phosphorothioate linkage
  modified_base 17: mod_base = OTHER; note = 2'-O-methoxyethyl modified thymine with phosphorothioate linkage
  modified_base 18: mod_base = OTHER; note = 2'-O-methoxyethyl modified nucleotide with phosphorothioate linkage
  modified_base 19: mod_base = OTHER; note = 2'-O-methoxyethyl 5-methylcytosine with phosphorothioate linkage
  modified_base 20: mod_base = OTHER; note = 2'-O-methoxyethyl modified nucleotide with phosphorothioate linkage
  modified_base 21: mod_base = OTHER; note = 2'-O-methoxyethyl 5-methylcytosine
  misc_feature 1..6: note = RNA
  misc_feature 7..15: note = DNA
  misc_feature 16..21: note = RNA
cagaggtgaagcgaagtgcac

SEQ ID NO: 877 - DNA, 21 bp, synthetic construct
  source 1..21: mol_type = other DNA
  modified_base 1: mod_base = OTHER; note = 2'-O-methoxyethyl 5-methylcytosine with phosphorothioate linkage
  modified_base 2: mod_base = OTHER; note = 2'-O-methoxyethyl modified nucleotide with phosphorothioate linkage
  modified_base 3: mod_base = OTHER; note = 2'-O-methoxyethyl modified nucleotide with phosphorothioate linkage
  modified_base 4: mod_base = OTHER; note = 2'-O-methoxyethyl modified nucleotide with phosphorothioate linkage
  modified_base 5: mod_base = OTHER; note = 2'-O-methoxyethyl modified nucleotide with phosphorothioate linkage
  modified_base 6: mod_base = OTHER; note = 2'-O-methoxyethyl modified nucleotide with phosphorothioate linkage
  modified_base 7: mod_base = OTHER; note = 2'-O-methoxyethyl modified thymine with phosphorothioate linkage
  modified_base 8: mod_base = OTHER; note = Nucleotide with phosphorothioate linkage
  modified_base 9: mod_base = OTHER; note = Nucleotide with phosphorothioate linkage
  modified_base 10: mod_base = OTHER; note = Nucleotide with phosphorothioate linkage
  modified_base 11: mod_base = OTHER; note = Nucleotide with phosphorothioate linkage
  modified_base 12: mod_base = OTHER; note = 5-methylcytosine with phosphorothioate linkage
  modified_base 13: mod_base = OTHER; note = Nucleotide with phosphorothioate linkage
  modified_base 14: mod_base = OTHER; note = Nucleotide with phosphorothioate linkage
  modified_base 15: mod_base = OTHER; note = Nucleotide with phosphorothioate linkage
  modified_base 16: mod_base = OTHER; note = Nucleotide with phosphorothioate linkage
  modified_base 17: mod_base = OTHER; note = 2'-O-methoxyethyl modified thymine with phosphorothioate linkage
  modified_base 18: mod_base = OTHER; note = 2'-O-methoxyethyl modified nucleotide with phosphorothioate linkage
  modified_base 19: mod_base = OTHER; note = 2'-O-methoxyethyl 5-methylcytosine with phosphorothioate linkage
  modified_base 20: mod_base = OTHER; note = 2'-O-methoxyethyl modified nucleotide with phosphorothioate linkage
  modified_base 21: mod_base = OTHER; note = 2'-O-methoxyethyl 5-methylcytosine
  misc_feature 1..7: note = RNA
  misc_feature 8..16: note = DNA
  misc_feature 17..21: note = RNA
cagaggtgaagcgaagtgcac

SEQ ID NO: 878 - DNA, 21 bp, synthetic construct
  source 1..21: mol_type = other DNA
  modified_base 1: mod_base = OTHER; note = 2'-O-methoxyethyl 5-methylcytosine with phosphorothioate linkage
  modified_base 2: mod_base = OTHER; note = 2'-O-methoxyethyl modified nucleotide with phosphorothioate linkage
  modified_base 3: mod_base = OTHER; note = 2'-O-methoxyethyl modified nucleotide with phosphorothioate linkage
  modified_base 4: mod_base = OTHER; note = 2'-O-methoxyethyl modified nucleotide with phosphorothioate linkage
  modified_base 5: mod_base = OTHER; note = 2'-O-methoxyethyl modified nucleotide with phosphorothioate linkage
  modified_base 6: mod_base = OTHER; note = 2'-O-methoxyethyl modified nucleotide with phosphorothioate linkage
  modified_base 7: mod_base = OTHER; note = 2'-O-methoxyethyl modified thymine with phosphorothioate linkage
  modified_base 8: mod_base = OTHER; note = 2'-O-methoxyethyl modified nucleotide with phosphorothioate linkage
  modified_base 9: mod_base = OTHER; note = Nucleotide with phosphorothioate linkage
  modified_base 10: mod_base = OTHER; note = Nucleotide with phosphorothioate linkage
  modified_base 11: mod_base = OTHER; note = Nucleotide with phosphorothioate linkage
  modified_base 12: mod_base = OTHER; note = 5-methylcytosine with phosphorothioate linkage
  modified_base 13: mod_base = OTHER; note = Nucleotide with phosphorothioate linkage
  modified_base 14: mod_base = OTHER; note = Nucleotide with phosphorothioate linkage
  modified_base 15: mod_base = OTHER; note = Nucleotide with phosphorothioate linkage
  modified_base 16: mod_base = OTHER; note = Nucleotide with phosphorothioate linkage
  modified_base 17: mod_base = OTHER; note = Thymine with phosphorothioate linkage
  modified_base 18: mod_base = OTHER; note = 2'-O-methoxyethyl modified nucleotide with phosphorothioate linkage
  modified_base 19: mod_base = OTHER; note = 2'-O-methoxyethyl 5-methylcytosine with phosphorothioate linkage
  modified_base 20: mod_base = OTHER; note = 2'-O-methoxyethyl modified nucleotide with phosphorothioate linkage
  modified_base 21: mod_base = OTHER; note = 2'-O-methoxyethyl 5-methylcytosine
  misc_feature 1..8: note = RNA
  misc_feature 9..17: note = DNA
  misc_feature 18..21: note = RNA
cagaggtgaagcgaagtgcac

SEQ ID NO: 879 - DNA, 21 bp, synthetic construct
  source 1..21: mol_type = other DNA
  modified_base 1: mod_base = OTHER; note = 2'-O-methoxyethyl 5-methylcytosine with phosphorothioate linkage
  modified_base 2: mod_base = OTHER; note = 2'-O-methoxyethyl modified nucleotide with phosphorothioate linkage
  modified_base 3: mod_base = OTHER; note = 2'-O-methoxyethyl modified nucleotide with phosphorothioate linkage
  modified_base 4: mod_base = OTHER; note = 2'-O-methoxyethyl modified nucleotide with phosphorothioate linkage
  modified_base 5: mod_base = OTHER; note = 2'-O-methoxyethyl modified nucleotide with phosphorothioate linkage
  modified_base 6: mod_base = OTHER; note = 2'-O-methoxyethyl modified nucleotide with phosphorothioate linkage
  modified_base 7: mod_base = OTHER; note = Thymine with phosphorothioate linkage
  modified_base 8: mod_base = OTHER; note = Nucleotide with phosphorothioate linkage
  modified_base 9: mod_base = OTHER; note = Nucleotide with phosphorothioate linkage
  modified_base 10: mod_base = OTHER; note = Nucleotide with phosphorothioate linkage
  modified_base 11: mod_base = OTHER; note = Nucleotide with phosphorothioate linkage
  modified_base 12: mod_base = OTHER; note = 5-methylcytosine with phosphorothioate linkage
  modified_base 13: mod_base = OTHER; note = Nucleotide with phosphorothioate linkage
  modified_base 14: mod_base = OTHER; note = Nucleotide with phosphorothioate linkage
  modified_base 15: mod_base = OTHER; note = 2'-O-methoxyethyl modified nucleotide with phosphorothioate linkage
  modified_base 16: mod_base = OTHER; note = 2'-O-methoxyethyl modified nucleotide with phosphorothioate linkage
  modified_base 17: mod_base = OTHER; note = 2'-O-methoxyethyl modified thymine with phosphorothioate linkage
  modified_base 18: mod_base = OTHER; note = 2'-O-methoxyethyl modified nucleotide with phosphorothioate linkage
  modified_base 19: mod_base = OTHER; note = 2'-O-methoxyethyl 5-methylcytosine with phosphorothioate linkage
  modified_base 20: mod_base = OTHER; note = 2'-O-methoxyethyl modified nucleotide with phosphorothioate linkage
  modified_base 21: mod_base = OTHER; note = 2'-O-methoxyethyl 5-methylcytosine
  misc_feature 1..6: note = RNA
  misc_feature 7..14: note = DNA
  misc_feature 15..21: note = RNA
cagaggtgaagcgaagtgcac

SEQ ID NO: 880 - DNA, 21 bp, synthetic construct
  source 1..21: mol_type = other DNA
  modified_base 1: mod_base = OTHER; note = 2'-O-methoxyethyl 5-methylcytosine with phosphorothioate linkage
  modified_base 2: mod_base = OTHER; note = 2'-O-methoxyethyl modified nucleotide with phosphorothioate linkage
  modified_base 3: mod_base = OTHER; note = 2'-O-methoxyethyl modified nucleotide with phosphorothioate linkage
  modified_base 4: mod_base = OTHER; note = 2'-O-methoxyethyl modified nucleotide with phosphorothioate linkage
  modified_base 5: mod_base = OTHER; note = 2'-O-methoxyethyl modified nucleotide with phosphorothioate linkage
  modified_base 6: mod_base = OTHER; note = 2'-O-methoxyethyl modified nucleotide with phosphorothioate linkage
  modified_base 7: mod_base = OTHER; note = 2'-O-methoxyethyl modified thymine with phosphorothioate linkage
  modified_base 8: mod_base = OTHER; note = Nucleotide with phosphorothioate linkage
  modified_base 9: mod_base = OTHER; note = Nucleotide with phosphorothioate linkage
  modified_base 10: mod_base = OTHER; note = Nucleotide with phosphorothioate linkage
  modified_base 11: mod_base = OTHER; note = Nucleotide with phosphorothioate linkage
  modified_base 12: mod_base = OTHER; note = 5-methylcytosine with phosphorothioate linkage
  modified_base 13: mod_base = OTHER; note = Nucleotide with phosphorothioate linkage
  modified_base 14: mod_base = OTHER; note = Nucleotide with phosphorothioate linkage
  modified_base 15: mod_base = OTHER; note = Nucleotide with phosphorothioate linkage
  modified_base 16: mod_base = OTHER; note = 2'-O-methoxyethyl modified nucleotide with phosphorothioate linkage
  modified_base 17: mod_base = OTHER; note = 2'-O-methoxyethyl modified thymine with phosphorothioate linkage
  modified_base 18: mod_base = OTHER; note = 2'-O-methoxyethyl modified nucleotide with phosphorothioate linkage
  modified_base 19: mod_base = OTHER; note = 2'-O-methoxyethyl 5-methylcytosine with phosphorothioate linkage
  modified_base 20: mod_base = OTHER; note = 2'-O-methoxyethyl modified nucleotide with phosphorothioate linkage
  modified_base 21: mod_base = OTHER; note = 2'-O-methoxyethyl 5-methylcytosine
  misc_feature 1..7: note = RNA
  misc_feature 8..15: note = DNA
  misc_feature 16..21: note = RNA
cagaggtgaagcgaagtgcac

SEQ ID NO: 881 - DNA, 21 bp, synthetic construct
  source 1..21: mol_type = other DNA
  modified_base 1: mod_base = OTHER; note = 2'-O-methoxyethyl 5-methylcytosine with phosphorothioate linkage
  modified_base 2: mod_base = OTHER; note = 2'-O-methoxyethyl modified nucleotide with phosphorothioate linkage
  modified_base 3: mod_base = OTHER; note = 2'-O-methoxyethyl modified nucleotide with phosphorothioate linkage
  modified_base 4: mod_base = OTHER; note = 2'-O-methoxyethyl modified nucleotide with phosphorothioate linkage
  modified_base 5: mod_base = OTHER; note = 2'-O-methoxyethyl modified nucleotide with phosphorothioate linkage
  modified_base 6: mod_base = OTHER; note = Nucleotide with phosphorothioate linkage
  modified_base 7: mod_base = OTHER; note = Thymine with phosphorothioate linkage
  modified_base 8: mod_base = OTHER; note = Nucleotide with phosphorothioate linkage
  modified_base 9: mod_base = OTHER; note = Nucleotide with phosphorothioate linkage
  modified_base 10: mod_base = OTHER; note = Nucleotide with phosphorothioate linkage
  modified_base 11: mod_base = OTHER; note = Nucleotide with phosphorothioate linkage
  modified_base 12: mod_base = OTHER; note = 5-methylcytosine with phosphorothioate linkage
  modified_base 13: mod_base = OTHER; note = Nucleotide with phosphorothioate linkage
  modified_base 14: mod_base = OTHER; note = Nucleotide with phosphorothioate linkage
  modified_base 15: mod_base = OTHER; note = Nucleotide with phosphorothioate linkage
  modified_base 16: mod_base = OTHER; note = Nucleotide with phosphorothioate linkage
  modified_base 17: mod_base = OTHER; note = 2'-O-methoxyethyl modified thymine with phosphorothioate linkage
  modified_base 18: mod_base = OTHER; note = 2'-O-methoxyethyl modified nucleotide with phosphorothioate linkage
  modified_base 19: mod_base = OTHER; note = 2'-O-methoxyethyl 5-methylcytosine with phosphorothioate linkage
  modified_base 20: mod_base = OTHER; note = 2'-O-methoxyethyl modified nucleotide with phosphorothioate linkage
  modified_base 21: mod_base = OTHER; note = 2'-O-methoxyethyl 5-methylcytosine
  misc_feature 1..5: note = RNA
  misc_feature 6..16: note = DNA
  misc_feature 17..21: note = RNA
cagaggtgaagcgaagtgcac

SEQ ID NO: 882 - DNA, 20 bp, synthetic construct
  source 1..20: mol_type = other DNA
  modified_base 1: mod_base = OTHER; note = 2'-O-methoxyethyl 5-methylcytosine with phosphorothioate linkage
  modified_base 2: mod_base = OTHER; note = 2'-O-methoxyethyl modified nucleotide with phosphorothioate linkage
  modified_base 3: mod_base = OTHER; note = Locked nucleic acid with phosphorothioate linkage
  modified_base 4: mod_base = OTHER; note = 2'-O-methoxyethyl modified nucleotide with phosphorothioate linkage
  modified_base 5: mod_base = OTHER; note = 2'-O-methoxyethyl modified nucleotide with phosphorothioate linkage
  modified_base 6: mod_base = OTHER; note = Nucleotide with phosphorothioate linkage
  modified_base 7: mod_base = OTHER; note = Thymine with phosphorothioate linkage
  modified_base 8: mod_base = OTHER; note = Nucleotide with phosphorothioate linkage
  modified_base 9: mod_base = OTHER; note = 5-O-cyclopropyl modified nucleotide with phosphorothioate linkage
  modified_base 10: mod_base = OTHER; note = Nucleotide with phosphorothioate linkage
  modified_base 11: mod_base = OTHER; note = Nucleotide with phosphorothioate linkage
  modified_base 12: mod_base = OTHER; note = 5-methylcytosine with phosphorothioate linkage
  modified_base 13: mod_base = OTHER; note = Nucleotide with phosphorothioate linkage
  modified_base 14: mod_base = OTHER; note = Nucleotide with phosphorothioate linkage
  modified_base 15: mod_base = OTHER; note = Nucleotide with phosphorothioate linkage
  modified_base 16: mod_base = OTHER; note = 2'-O-methoxyethyl modified nucleotide with phosphorothioate linkage
  modified_base 17: mod_base = OTHER; note = 2'-O-methoxyethyl modified thymine with phosphorothioate linkage
  modified_base 18: mod_base = OTHER; note = Locked nucleic acid with phosphorothioate linkage
  modified_base 19: mod_base = OTHER; note = 2'-O-methoxyethyl 5-methylcytosine with phosphorothioate linkage
  modified_base 20: mod_base = OTHER; note = 2'-O-methoxyethyl modified nucleotide
  misc_feature 1..5: note = RNA
  misc_feature 6..8: note = DNA
  misc_feature 9: note = RNA
  misc_feature 10..15: note = DNA
  misc_feature 16..20: note = RNA
cagaggtgaagcgaagtgca

SEQ ID NO: 883 - DNA, 20 bp, synthetic construct
  source 1..20: mol_type = other DNA
  modified_base 1: mod_base = OTHER; note = 2'-O-methoxyethyl 5-methylcytosine with phosphorothioate linkage
  modified_base 2: mod_base = OTHER; note = 2'-O-methoxyethyl modified nucleotide with phosphorothioate linkage
  modified_base 3: mod_base = OTHER; note = Locked nucleic acid with phosphorothioate linkage
  modified_base 4: mod_base = OTHER; note = 2'-O-methoxyethyl modified nucleotide with phosphorothioate linkage
  modified_base 5: mod_base = OTHER; note = 2'-O-methoxyethyl modified nucleotide with phosphorothioate linkage
  modified_base 6: mod_base = OTHER; note = Nucleotide with phosphorothioate linkage
  modified_base 7: mod_base = OTHER; note = Thymine with phosphorothioate linkage
  modified_base 8: mod_base = OTHER; note = Nucleotide with phosphorothioate linkage
  modified_base 9: mod_base = OTHER; note = 5-O-cyclopropyl modified nucleotide with phosphorothioate linkage
  modified_base 10: mod_base = OTHER; note = Nucleotide with phosphorothioate linkage
  modified_base 11: mod_base = OTHER; note = Nucleotide with phosphorothioate linkage
  modified_base 12: mod_base = OTHER; note = 5-methylcytosine with phosphorothioate linkage
  modified_base 13: mod_base = OTHER; note = Nucleotide with phosphorothioate linkage
  modified_base 14: mod_base = OTHER; note = Nucleotide with phosphorothioate linkage
  modified_base 15: mod_base = OTHER; note = Nucleotide with phosphorothioate linkage
  modified_base 16: mod_base = OTHER; note = 2'-O-methoxyethyl modified nucleotide with phosphorothioate linkage
  modified_base 17: mod_base = OTHER; note = 2'-O-methoxyethyl modified thymine with phosphorothioate linkage
  modified_base 18: mod_base = OTHER; note = Locked nucleic acid with phosphorothioate linkage
  modified_base 19: mod_base = OTHER; note = 2'-O-methoxyethyl 5-methylcytosine with phosphorothioate linkage
  modified_base 20: mod_base = OTHER; note = 2'-O-methoxyethyl modified nucleotide
  misc_feature 1..5: note = RNA
  misc_feature 6..8: note = DNA
  misc_feature 9: note = RNA
  misc_feature 10..15: note = DNA
  misc_feature 16..20: note = RNA
cagaggtgaagcgaagtgca

SEQ ID NO: 884 - DNA, 20 bp, synthetic construct
  source 1..20: mol_type = other DNA
  modified_base 1: mod_base = OTHER; note = 2'-O-methoxyethyl 5-methylcytosine with phosphorothioate linkage
  modified_base 2: mod_base = OTHER; note = 2'-O-methoxyethyl modified nucleotide with phosphorothioate linkage
  modified_base 3: mod_base = OTHER; note = Locked nucleic acid with phosphorothioate linkage
  modified_base 4: mod_base = OTHER; note = 2'-O-methoxyethyl modified nucleotide with phosphorothioate linkage
  modified_base 5: mod_base = OTHER; note = 2'-O-methoxyethyl modified nucleotide with phosphorothioate linkage
  modified_base 6: mod_base = OTHER; note = Nucleotide with phosphorothioate linkage
  modified_base 7: mod_base = OTHER; note = Thymine with phosphorothioate linkage
  modified_base 8: mod_base = OTHER; note = Nucleotide with phosphorothioate linkage
  modified_base 9: mod_base = OTHER; note = 5-O-methylcyclopropyl modified nucleotide with phosphorothioate linkage
  modified_base 10: mod_base = OTHER; note = Nucleotide with phosphorothioate linkage
  modified_base 11: mod_base = OTHER; note = Nucleotide with phosphorothioate linkage
  modified_base 12: mod_base = OTHER; note = 5-methylcytosine with phosphorothioate linkage
  modified_base 13: mod_base = OTHER; note = Nucleotide with phosphorothioate linkage
  modified_base 14: mod_base = OTHER; note = Nucleotide with phosphorothioate linkage
  modified_base 15: mod_base = OTHER; note = Nucleotide with phosphorothioate linkage
  modified_base 16: mod_base = OTHER; note = 2'-O-methoxyethyl modified nucleotide with phosphorothioate linkage
  modified_base 17: mod_base = OTHER; note = 2'-O-methoxyethyl modified thymine with phosphorothioate linkage
  modified_base 18: mod_base = OTHER; note = Locked nucleic acid with phosphorothioate linkage
  modified_base 19: mod_base = OTHER; note = 2'-O-methoxyethyl 5-methylcytosine with phosphorothioate linkage
  modified_base 20: mod_base = OTHER; note = 2'-O-methoxyethyl modified nucleotide
  misc_feature 1..5: note = RNA
  misc_feature 6..8: note = DNA
  misc_feature 9: note = RNA
  misc_feature 10..15: note = DNA
  misc_feature 16..20: note = RNA
cagaggtgaagcgaagtgca

SEQ ID NO: 885 - DNA, 20 bp, synthetic construct
  source 1..20: mol_type = other DNA
  modified_base 1: mod_base = OTHER; note = 2'-O-methoxyethyl 5-methylcytosine with phosphorothioate linkage
  modified_base 2: mod_base = OTHER; note = 2'-O-methoxyethyl modified nucleotide with phosphorothioate linkage
  modified_base 3: mod_base = OTHER; note = Locked nucleic acid with phosphorothioate linkage
  modified_base 4: mod_base = OTHER; note = 2'-O-methoxyethyl modified nucleotide with phosphorothioate linkage
  modified_base 5: mod_base = OTHER; note = 2'-O-methoxyethyl modified nucleotide with phosphorothioate linkage
  modified_base 6: mod_base = OTHER; note = Nucleotide with phosphorothioate linkage
  modified_base 7: mod_base = OTHER; note = Thymine with phosphorothioate linkage
  modified_base 8: mod_base = OTHER; note = Nucleotide with phosphorothioate linkage
  modified_base 9: mod_base = OTHER; note = 5-O-methylcyclopropyl modified nucleotide with phosphorothioate linkage
  modified_base 10: mod_base = OTHER; note = Nucleotide with phosphorothioate linkage
  modified_base 11: mod_base = OTHER; note = Nucleotide with phosphorothioate linkage
  modified_base 12: mod_base = OTHER; note = 5-methylcytosine with phosphorothioate linkage
  modified_base 13: mod_base = OTHER; note = Nucleotide with phosphorothioate linkage
  modified_base 14: mod_base = OTHER; note = Nucleotide with phosphorothioate linkage
  modified_base 15: mod_base = OTHER; note = Nucleotide with phosphorothioate linkage
  modified_base 16: mod_base = OTHER; note = 2'-O-methoxyethyl modified nucleotide with phosphorothioate linkage
  modified_base 17: mod_base = OTHER; note = 2'-O-methoxyethyl modified thymine with phosphorothioate linkage
  modified_base 18: mod_base = OTHER; note = Locked nucleic acid with phosphorothioate linkage
  modified_base 19: mod_base = OTHER; note = 2'-O-methoxyethyl 5-methylcytosine with phosphorothioate linkage
  modified_base 20: mod_base = OTHER; note = 2'-O-methoxyethyl modified nucleotide
  misc_feature 1..5: note = RNA
  misc_feature 6..8: note = DNA
  misc_feature 9: note = RNA
  misc_feature 10..15: note = DNA
  misc_feature 16..20: note = RNA
cagaggtgaagcgaagtgca

SEQ ID NO: 886 - DNA, 20 bp, synthetic construct
  source 1..20: mol_type = other DNA
  modified_base 1: mod_base = OTHER; note = 2'-O-methoxyethyl 5-methylcytosine with phosphorothioate linkage
  modified_base 2: mod_base = OTHER; note = 2'-O-methoxyethyl modified nucleotide with phosphorothioate linkage
  modified_base 3: mod_base = OTHER; note = Locked nucleic acid with phosphorothioate linkage
  modified_base 4: mod_base = OTHER; note = 2'-O-methoxyethyl modified nucleotide with phosphorothioate linkage
  modified_base 5: mod_base = OTHER; note = 2'-O-methoxyethyl modified nucleotide with phosphorothioate linkage
  modified_base 6: mod_base = OTHER; note = Nucleotide with phosphorothioate linkage
  modified_base 7: mod_base = OTHER; note = Thymine with phosphorothioate linkage
  modified_base 8: mod_base = OTHER; note = Nucleotide with phosphorothioate linkage
  modified_base 9: mod_base = OTHER; note = Nucleotide with phosphorothioate linkage
  modified_base 10: mod_base = OTHER; note = 5-O-cyclopropyl modified nucleotide with phosphorothioate linkage
  modified_base 11: mod_base = OTHER; note = Nucleotide with phosphorothioate linkage
  modified_base 12: mod_base = OTHER; note = 5-methylcytosine with phosphorothioate linkage
  modified_base 13: mod_base = OTHER; note = Nucleotide with phosphorothioate linkage
  modified_base 14: mod_base = OTHER; note = Nucleotide with phosphorothioate linkage
  modified_base 15: mod_base = OTHER; note = Nucleotide with phosphorothioate linkage
  modified_base 16: mod_base = OTHER; note = 2'-O-methoxyethyl modified nucleotide with phosphorothioate linkage
  modified_base 17: mod_base = OTHER; note = 2'-O-methoxyethyl modified thymine with phosphorothioate linkage
  modified_base 18: mod_base = OTHER; note = Locked nucleic acid with phosphorothioate linkage
  modified_base 19: mod_base = OTHER; note = 2'-O-methoxyethyl 5-methylcytosine with phosphorothioate linkage
  modified_base 20: mod_base = OTHER; note = 2'-O-methoxyethyl modified nucleotide
  misc_feature 1..5: note = RNA
  misc_feature 6..9: note = DNA
  misc_feature 10: note = RNA
  misc_feature 11..15: note = DNA
  misc_feature 16..20: note = RNA
cagaggtgaagcgaagtgca

SEQ ID NO: 887 - DNA, 20 bp, synthetic construct
  source 1..20: mol_type = other DNA
  modified_base 1: mod_base = OTHER; note = 2'-O-methoxyethyl 5-methylcytosine with phosphorothioate linkage
  modified_base 2: mod_base = OTHER; note = 2'-O-methoxyethyl modified nucleotide with phosphorothioate linkage
  modified_base 3: mod_base = OTHER; note = Locked nucleic acid with phosphorothioate linkage
  modified_base 4: mod_base = OTHER; note = 2'-O-methoxyethyl modified nucleotide with phosphorothioate linkage
  modified_base 5: mod_base = OTHER; note = 2'-O-methoxyethyl modified nucleotide with phosphorothioate linkage
  modified_base 6: mod_base = OTHER; note = Nucleotide with phosphorothioate linkage
  modified_base 7: mod_base = OTHER; note = Thymine with phosphorothioate linkage
  modified_base 8: mod_base = OTHER; note = Nucleotide with phosphorothioate linkage
  modified_base 9: mod_base = OTHER; note = Nucleotide with phosphorothioate linkage
  modified_base 10: mod_base = OTHER; note = 5-O-cyclopropyl modified nucleotide with phosphorothioate linkage
  modified_base 11: mod_base = OTHER; note = Nucleotide with phosphorothioate linkage
  modified_base 12: mod_base = OTHER; note = 5-methylcytosine with phosphorothioate linkage
  modified_base 13: mod_base = OTHER; note = Nucleotide with phosphorothioate linkage
  modified_base 14: mod_base = OTHER; note = Nucleotide with phosphorothioate linkage
  modified_base 15: mod_base = OTHER; note = Nucleotide with phosphorothioate linkage
  modified_base 16: mod_base = OTHER; note = 2'-O-methoxyethyl modified nucleotide with phosphorothioate linkage
  modified_base 17: mod_base = OTHER; note = 2'-O-methoxyethyl modified thymine with phosphorothioate linkage
  modified_base 18: mod_base = OTHER; note = Locked nucleic acid with phosphorothioate linkage
  modified_base 19: mod_base = OTHER; note = 2'-O-methoxyethyl 5-methylcytosine with phosphorothioate linkage
  modified_base 20: mod_base = OTHER; note = 2'-O-methoxyethyl modified nucleotide
  misc_feature 1..5: note = RNA
  misc_feature 6..9: note = DNA
  misc_feature 10: note = RNA
  misc_feature 11..15: note = DNA
  misc_feature 16..20: note = RNA
cagaggtgaagcgaagtgca

SEQ ID NO: 888 - DNA, 20 bp, synthetic construct
  source 1..20: mol_type = other DNA
  modified_base 1: mod_base = OTHER; note = 2'-O-methoxyethyl 5-methylcytosine with phosphorothioate linkage
  modified_base 2: mod_base = OTHER; note = 2'-O-methoxyethyl modified nucleotide with phosphorothioate linkage
  modified_base 3: mod_base = OTHER; note = Locked nucleic acid with phosphorothioate linkage
  modified_base 4: mod_base = OTHER; note = 2'-O-methoxyethyl modified nucleotide with phosphorothioate linkage
  modified_base 5: mod_base = OTHER; note = 2'-O-methoxyethyl modified nucleotide with phosphorothioate linkage
  modified_base 6: mod_base = OTHER; note = Nucleotide with phosphorothioate linkage
  modified_base 7: mod_base = OTHER; note = Thymine with phosphorothioate linkage
  modified_base 8: mod_base = OTHER; note = Nucleotide with phosphorothioate linkage
  modified_base 9: mod_base = OTHER; note = Nucleotide with phosphorothioate linkage
  modified_base 10: mod_base = OTHER; note = 5-O-methylcyclopropyl modified nucleotide with phosphorothioate linkage
  modified_base 11: mod_base = OTHER; note = Nucleotide with phosphorothioate linkage
  modified_base 12: mod_base = OTHER; note = 5-methylcytosine with phosphorothioate linkage
  modified_base 13: mod_base = OTHER; note = Nucleotide with phosphorothioate linkage
  modified_base 14: mod_base = OTHER; note = Nucleotide with phosphorothioate linkage
  modified_base 15: mod_base = OTHER; note = Nucleotide with phosphorothioate linkage
  modified_base 16: mod_base = OTHER; note = 2'-O-methoxyethyl modified nucleotide with phosphorothioate linkage
  modified_base 17: mod_base = OTHER; note = 2'-O-methoxyethyl modified thymine with phosphorothioate linkage
  modified_base 18: mod_base = OTHER; note = Locked nucleic acid with phosphorothioate linkage
  modified_base 19: mod_base = OTHER; note = 2'-O-methoxyethyl 5-methylcytosine with phosphorothioate linkage
  modified_base 20: mod_base = OTHER; note = 2'-O-methoxyethyl modified nucleotide
  misc_feature 1..5: note = RNA
  misc_feature 6..9: note = DNA
  misc_feature 10: note = RNA
  misc_feature 11..15: note = DNA
  misc_feature 16..20: note = RNA
cagaggtgaagcgaagtgca

SEQ ID NO: 889 - DNA, 20 bp, synthetic construct
  source 1..20: mol_type = other DNA
  modified_base 1: mod_base = OTHER; note = 2'-O-methoxyethyl 5-methylcytosine with phosphorothioate linkage
  modified_base 2: mod_base = OTHER; note = 2'-O-methoxyethyl modified nucleotide with phosphorothioate linkage
  modified_base 3: mod_base = OTHER; note = Locked nucleic acid with phosphorothioate linkage
  modified_base 4: mod_base = OTHER; note = 2'-O-methoxyethyl modified nucleotide with phosphorothioate linkage
  modified_base 5: mod_base = OTHER; note = 2'-O-methoxyethyl modified nucleotide with phosphorothioate linkage
  modified_base 6: mod_base = OTHER; note = Nucleotide with phosphorothioate linkage
  modified_base 7: mod_base = OTHER; note = Thymine with phosphorothioate linkage
  modified_base 8: mod_base = OTHER; note = Nucleotide with phosphorothioate linkage
  modified_base 9: mod_base = OTHER; note = Nucleotide with phosphorothioate linkage
  modified_base 10: mod_base = OTHER; note = 5-O-methylcyclopropyl modified nucleotide with phosphorothioate linkage
  modified_base 11: mod_base = OTHER; note = Nucleotide with phosphorothioate linkage
  modified_base 12: mod_base = OTHER; note = 5-methylcytosine with phosphorothioate linkage
  modified_base 13: mod_base = OTHER; note = Nucleotide with phosphorothioate linkage
  modified_base 14: mod_base = OTHER; note = Nucleotide with phosphorothioate linkage
  modified_base 15: mod_base = OTHER; note = Nucleotide with phosphorothioate linkage
  modified_base 16: mod_base = OTHER; note = 2'-O-methoxyethyl modified nucleotide with phosphorothioate linkage
  modified_base 17: mod_base = OTHER; note = 2'-O-methoxyethyl modified thymine with phosphorothioate linkage
  modified_base 18: mod_base = OTHER; note = Locked nucleic acid with phosphorothioate linkage
  modified_base 19: mod_base = OTHER; note = 2'-O-methoxyethyl 5-methylcytosine with phosphorothioate linkage
  modified_base 20: mod_base = OTHER; note = 2'-O-methoxyethyl modified nucleotide
  misc_feature 1..5: note = RNA
  misc_feature 6..9: note = DNA
  misc_feature 10: note = RNA
  misc_feature 11..15: note = DNA
  misc_feature 16..20: note = RNA
cagaggtgaagcgaagtgca

SEQ ID NO: 890 - DNA, 20 bp, synthetic construct
  source 1..20: mol_type = other DNA
  modified_base 1: mod_base = OTHER; note = 2'-O-methoxyethyl 5-methylcytosine with phosphorothioate linkage
  modified_base 2: mod_base = OTHER; note = 2'-O-methoxyethyl modified nucleotide with phosphorothioate linkage
  modified_base 3: mod_base = OTHER; note = Locked nucleic acid with phosphorothioate linkage
  modified_base 4: mod_base = OTHER; note = 2'-O-methoxyethyl modified nucleotide with phosphorothioate linkage
  modified_base 5: mod_base = OTHER; note = 2'-O-methoxyethyl modified nucleotide with phosphorothioate linkage
  modified_base 6: mod_base = OTHER; note = Nucleotide with phosphorothioate linkage
  modified_base 7: mod_base = OTHER; note = Thymine with phosphorothioate linkage
  modified_base 8: mod_base = OTHER; note = Nucleotide with phosphorothioate linkage
  modified_base 9: mod_base = OTHER; note = Nucleotide with phosphorothioate linkage
  modified_base 10: mod_base = OTHER; note = Nucleotide with phosphorothioate linkage
  modified_base 11: mod_base = OTHER; note = 5-O-cyclopropyl modified nucleotide with phosphorothioate linkage
  modified_base 12: mod_base = OTHER; note = 5-methylcytosine with phosphorothioate linkage
  modified_base 13: mod_base = OTHER; note = Nucleotide with phosphorothioate linkage
  modified_base 14: mod_base = OTHER; note = Nucleotide with phosphorothioate linkage
  modified_base 15: mod_base = OTHER; note = Nucleotide with phosphorothioate linkage
  modified_base 16: mod_base = OTHER; note = 2'-O-methoxyethyl modified nucleotide with phosphorothioate linkage
  modified_base 17: mod_base = OTHER; note = 2'-O-methoxyethyl modified thymine with phosphorothioate linkage
  modified_base 18: mod_base = OTHER; note = Locked nucleic acid with phosphorothioate linkage
  modified_base 19: mod_base = OTHER; note = 2'-O-methoxyethyl 5-methylcytosine with phosphorothioate linkage
  modified_base 20: mod_base = OTHER; note = 2'-O-methoxyethyl modified nucleotide
  misc_feature 1..5: note = RNA
  misc_feature 6..10: note = DNA
  misc_feature 11: note = RNA
  misc_feature 12..15: note = DNA
  misc_feature 16..20: note = RNA
cagaggtgaagcgaagtgca

SEQ ID NO: 891 - DNA, 20 bp, synthetic construct
  source 1..20: mol_type = other DNA
  modified_base 1: mod_base = OTHER; note = 2'-O-methoxyethyl 5-methylcytosine with phosphorothioate linkage
  modified_base 2: mod_base = OTHER; note = 2'-O-methoxyethyl modified nucleotide with phosphorothioate linkage
  modified_base 3: mod_base = OTHER; note = Locked nucleic acid with phosphorothioate linkage
  modified_base 4: mod_base = OTHER; note = 2'-O-methoxyethyl modified nucleotide with phosphorothioate linkage
  modified_base 5: mod_base = OTHER; note = 2'-O-methoxyethyl modified nucleotide with phosphorothioate linkage
  modified_base 6: mod_base = OTHER; note = Nucleotide with phosphorothioate linkage
  modified_base 7: mod_base = OTHER; note = Thymine with phosphorothioate linkage
  modified_base 8: mod_base = OTHER; note = Nucleotide with phosphorothioate linkage
  modified_base 9: mod_base = OTHER; note = Nucleotide with phosphorothioate linkage
  modified_base 10: mod_base = OTHER; note = Nucleotide with phosphorothioate linkage
  modified_base 11: mod_base = OTHER; note = 5-O-methylcyclopropyl modified nucleotide with phosphorothioate linkage
  modified_base 12: mod_base = OTHER; note = 5-methylcytosine with phosphorothioate linkage
  modified_base 13: mod_base = OTHER; note = Nucleotide with phosphorothioate linkage
  modified_base 14: mod_base = OTHER; note = Nucleotide with phosphorothioate linkage
  modified_base 15: mod_base = OTHER; note = Nucleotide with phosphorothioate linkage
  modified_base 16: mod_base = OTHER; note = 2'-O-methoxyethyl modified nucleotide with phosphorothioate linkage
  modified_base 17: mod_base = OTHER; note = 2'-O-methoxyethyl modified thymine with phosphorothioate linkage
  modified_base 18: mod_base = OTHER; note = Locked nucleic acid with phosphorothioate linkage
  modified_base 19: mod_base = OTHER; note = 2'-O-methoxyethyl 5-methylcytosine with phosphorothioate linkage
  modified_base 20: mod_base = OTHER; note = 2'-O-methoxyethyl modified nucleotide
  misc_feature 1..5: note = RNA
  misc_feature 6..10: note = DNA
  misc_feature 11: note = RNA
  misc_feature 12..15: note = DNA
  misc_feature 16..20: note = RNA
cagaggtgaagcgaagtgca

SEQ ID NO: 892 - DNA, 20 bp, synthetic construct
  source 1..20: mol_type = other DNA
  modified_base 1: mod_base = OTHER; note = 2'-O-methoxyethyl 5-methylcytosine with phosphorothioate linkage
  modified_base 2: mod_base = OTHER; note = 2'-O-methoxyethyl modified nucleotide with phosphorothioate linkage
  modified_base 3: mod_base = OTHER; note = Locked nucleic acid with phosphorothioate linkage
  modified_base 4: mod_base = OTHER; note = 2'-O-methoxyethyl modified nucleotide with phosphorothioate linkage
  modified_base 5: mod_base = OTHER; note = 2'-O-methoxyethyl modified nucleotide with phosphorothioate linkage
  modified_base 6: mod_base = OTHER; note = Nucleotide with phosphorothioate linkage
  modified_base 7: mod_base = OTHER; note = Thymine with phosphorothioate linkage
  modified_base 8: mod_base = OTHER; note = Nucleotide with phosphorothioate linkage
  modified_base 9: mod_base = OTHER; note = Nucleotide with phosphorothioate linkage
  modified_base 10: mod_base = OTHER; note = Nucleotide with phosphorothioate linkage
  modified_base 11: mod_base = OTHER; note = Nucleotide with phosphorothioate linkage
  modified_base 12: mod_base = OTHER; note = 5-methylcytosine with phosphorothioate linkage
  modified_base 13: mod_base = OTHER; note = 5-O-cyclopropyl modified nucleotide with phosphorothioate linkage
  modified_base 14: mod_base = OTHER; note = Nucleotide with phosphorothioate linkage
  modified_base 15: mod_base = OTHER; note = Nucleotide with phosphorothioate linkage
  modified_base 16: mod_base = OTHER; note = 2'-O-methoxyethyl modified nucleotide with phosphorothioate linkage
  modified_base 17: mod_base = OTHER; note = 2'-O-methoxyethyl modified thymine with phosphorothioate linkage
  modified_base 18: mod_base = OTHER; note = Locked nucleic acid with phosphorothioate linkage
  modified_base 19: mod_base = OTHER; note = 2'-O-methoxyethyl 5-methylcytosine with phosphorothioate linkage
  modified_base 20: mod_base = OTHER; note = 2'-O-methoxyethyl modified nucleotide
  misc_feature 1..5: note = RNA
  misc_feature 6..12: note = DNA
  misc_feature 13: note = RNA
  misc_feature 14..15: note = DNA
  misc_feature 16..20: note = RNA
cagaggtgaagcgaagtgca

SEQ ID NO: 893 - DNA, 20 bp, synthetic construct
  source 1..20: mol_type = other DNA
  modified_base 1: mod_base = OTHER; note = 2'-O-methoxyethyl 5-methylcytosine with phosphorothioate linkage
  modified_base 2: mod_base = OTHER; note = 2'-O-methoxyethyl modified nucleotide with phosphorothioate linkage
  modified_base 3: mod_base = OTHER; note = Locked nucleic acid with phosphorothioate linkage
  modified_base 4: mod_base = OTHER; note = 2'-O-methoxyethyl modified nucleotide with phosphorothioate linkage
  modified_base 5: mod_base = OTHER; note = 2'-O-methoxyethyl modified nucleotide with phosphorothioate linkage
  modified_base 6: mod_base = OTHER; note = Nucleotide with phosphorothioate linkage
  modified_base 7: mod_base = OTHER; note = Thymine with phosphorothioate linkage
  modified_base 8: mod_base = OTHER; note = Nucleotide with phosphorothioate linkage
  modified_base 9: mod_base = OTHER; note = Nucleotide with phosphorothioate linkage
  modified_base 10: mod_base = OTHER; note = Nucleotide with phosphorothioate linkage
  modified_base 11: mod_base = OTHER; note = Nucleotide with phosphorothioate linkage
  modified_base 12: mod_base = OTHER; note = 5-methylcytosine with phosphorothioate linkage
  modified_base 13: mod_base = OTHER; note = 5-O-methylcyclopropyl modified nucleotide with phosphorothioate linkage
  modified_base 14: mod_base = OTHER; note = Nucleotide with phosphorothioate linkage
  modified_base 15: mod_base = OTHER; note = Nucleotide with phosphorothioate linkage
  modified_base 16: mod_base = OTHER; note = 2'-O-methoxyethyl modified nucleotide with phosphorothioate linkage
  modified_base 17: mod_base = OTHER; note = 2'-O-methoxyethyl modified thymine with phosphorothioate linkage
  modified_base 18: mod_base = OTHER; note = Locked nucleic acid with phosphorothioate linkage
  modified_base 19: mod_base = OTHER; note = 2'-O-methoxyethyl 5-methylcytosine with phosphorothioate linkage
  modified_base 20: mod_base = OTHER; note = 2'-O-methoxyethyl modified nucleotide
  misc_feature 1..5: note = RNA
  misc_feature 6..12: note = DNA
  misc_feature 13: note = RNA
  misc_feature 14..15: note = DNA
  misc_feature 16..20: note = RNA
cagaggtgaagcgaagtgca

SEQ ID NO: 894 - DNA, 20 bp, synthetic construct
  source 1..20: mol_type = other DNA
  modified_base 1: mod_base = OTHER; note = 2'-O-methoxyethyl 5-methylcytosine with phosphorothioate linkage
  modified_base 2: mod_base = OTHER; note = 2'-O-methoxyethyl modified nucleotide with phosphorothioate linkage
  modified_base 3: mod_base = OTHER; note = Locked nucleic acid with phosphorothioate linkage
  modified_base 4: mod_base = OTHER; note = 2'-O-methoxyethyl modified nucleotide with phosphorothioate linkage
  modified_base 5: mod_base = OTHER; note = 2'-O-methoxyethyl modified nucleotide with phosphorothioate linkage
  modified_base 6: mod_base = OTHER; note = Nucleotide with phosphorothioate linkage
  modified_base 7: mod_base = OTHER; note = Thymine with phosphorothioate linkage
  modified_base 8: mod_base = OTHER; note = Nucleotide with phosphorothioate linkage
  modified_base 9: mod_base = OTHER; note = Nucleotide with phosphorothioate linkage
  modified_base 10: mod_base = OTHER; note = Nucleotide with phosphorothioate linkage
  modified_base 11: mod_base = OTHER; note = Nucleotide with phosphorothioate linkage
  modified_base 12: mod_base = OTHER; note = 5-methylcytosine with phosphorothioate linkage
  modified_base 13: mod_base = OTHER; note = Nucleotide with phosphorothioate linkage
  modified_base 14: mod_base = OTHER; note = 5-O-cyclopropyl modified nucleotide with phosphorothioate linkage
  modified_base 15: mod_base = OTHER; note = Nucleotide with phosphorothioate linkage
  modified_base 16: mod_base = OTHER; note = 2'-O-methoxyethyl modified nucleotide with phosphorothioate linkage
  modified_base 17: mod_base = OTHER; note = 2'-O-methoxyethyl modified thymine with phosphorothioate linkage
  modified_base 18: mod_base = OTHER; note = Locked nucleic acid with phosphorothioate linkage
  modified_base 19: mod_base = OTHER; note = 2'-O-methoxyethyl 5-methylcytosine with phosphorothioate linkage
  modified_base 20: mod_base = OTHER; note = 2'-O-methoxyethyl modified nucleotide
  misc_feature 1..5: note = RNA
  misc_feature 6..13: note = DNA
  misc_feature 14: note = RNA
  misc_feature 15: note = DNA
  misc_feature 16..20: note = RNA
cagaggtgaagcgaagtgca

SEQ ID NO: 895 - DNA, 20 bp, synthetic construct
  source 1..20: mol_type = other DNA
  modified_base 1: mod_base = OTHER; note = 2'-O-methoxyethyl 5-methylcytosine with phosphorothioate linkage
  modified_base 2: mod_base = OTHER; note = 2'-O-methoxyethyl modified nucleotide with phosphorothioate linkage
  modified_base 3: mod_base = OTHER; note = Locked nucleic acid with phosphorothioate linkage
  modified_base 4: mod_base = OTHER; note = 2'-O-methoxyethyl modified nucleotide with phosphorothioate linkage
  modified_base 5: mod_base = OTHER; note = 2'-O-methoxyethyl modified nucleotide with phosphorothioate linkage
  modified_base 6: mod_base = OTHER; note = Nucleotide with phosphorothioate linkage
  modified_base 7: mod_base = OTHER; note = Thymine with phosphorothioate linkage
  modified_base 8: mod_base = OTHER; note = Nucleotide with phosphorothioate linkage
  modified_base 9: mod_base = OTHER; note = Nucleotide with phosphorothioate linkage
  modified_base 10: mod_base = OTHER; note = Nucleotide with phosphorothioate linkage
  modified_base 11: mod_base = OTHER; note = Nucleotide with phosphorothioate linkage
  modified_base 12: mod_base = OTHER; note = 5-methylcytosine with phosphorothioate linkage
  modified_base 13: mod_base = OTHER; note = Nucleotide with phosphorothioate linkage
  modified_base 14: mod_base = OTHER; note = 5-O-cyclopropyl modified nucleotide with phosphorothioate linkage
  modified_base 15: mod_base = OTHER; note = Nucleotide with phosphorothioate linkage
  modified_base 16: mod_base = OTHER; note = 2'-O-methoxyethyl modified nucleotide with phosphorothioate linkage
  modified_base 17: mod_base = OTHER; note = 2'-O-methoxyethyl modified thymine with phosphorothioate linkage
  modified_base 18: mod_base = OTHER; note = Locked nucleic acid with phosphorothioate linkage
  modified_base 19: mod_base = OTHER; note = 2'-O-methoxyethyl 5-methylcytosine with phosphorothioate linkage
  modified_base 20: mod_base = OTHER; note = 2'-O-methoxyethyl modified nucleotide
  misc_feature 1..5: note = RNA
  misc_feature 6..13: note = DNA
  misc_feature 14: note = RNA
  misc_feature 15: note = DNA
  misc_feature 16..20: note = RNA
cagaggtgaagcgaagtgca

SEQ ID NO: 896 - DNA, 20 bp, synthetic construct
  source 1..20: mol_type = other DNA
  modified_base 1: mod_base = OTHER; note = 2'-O-methoxyethyl 5-methylcytosine with phosphorothioate linkage
  modified_base 2: mod_base = OTHER; note = 2'-O-methoxyethyl modified nucleotide with phosphorothioate linkage
  modified_base 3: mod_base = OTHER; note = Locked nucleic acid with phosphorothioate linkage
  modified_base 4: mod_base = OTHER; note = 2'-O-methoxyethyl modified nucleotide with phosphorothioate linkage
  modified_base 5: mod_base = OTHER; note = 2'-O-methoxyethyl modified nucleotide with phosphorothioate linkage
  modified_base 6: mod_base = OTHER; note = Nucleotide with phosphorothioate linkage
  modified_base 7: mod_base = OTHER; note = Thymine with phosphorothioate linkage
  modified_base 8: mod_base = OTHER; note = Nucleotide with phosphorothioate linkage
  modified_base 9: mod_base = OTHER; note = Nucleotide with phosphorothioate linkage
  modified_base 10: mod_base = OTHER; note = Nucleotide with phosphorothioate linkage
  modified_base 11: mod_base = OTHER; note = Nucleotide with phosphorothioate linkage
  modified_base 12: mod_base = OTHER; note = 5-methylcytosine with phosphorothioate linkage
  modified_base 13: mod_base = OTHER; note = Nucleotide with phosphorothioate linkage
  modified_base 14: mod_base = OTHER; note = 5-O-methylcyclopropyl modified nucleotide with phosphorothioate linkage
  modified_base 15: mod_base = OTHER; note = Nucleotide with phosphorothioate linkage
  modified_base 16: mod_base = OTHER; note = 2'-O-methoxyethyl modified nucleotide with phosphorothioate linkage
  modified_base 17: mod_base = OTHER; note = 2'-O-methoxyethyl modified thymine with phosphorothioate linkage
  modified_base 18: mod_base = OTHER; note = Locked nucleic acid with phosphorothioate linkage
  modified_base 19: mod_base = OTHER; note = 2'-O-methoxyethyl 5-methylcytosine with phosphorothioate linkage
  modified_base 20: mod_base = OTHER; note = 2'-O-methoxyethyl modified nucleotide
  misc_feature 1..5: note = RNA
  misc_feature 6..13: note = DNA
  misc_feature 14: note = RNA
  misc_feature 15: note = DNA
  misc_feature 16..20: note = RNA
cagaggtgaagcgaagtgca

SEQ ID NO: 897 - DNA, 20 bp, synthetic construct
  source 1..20: mol_type = other DNA
  modified_base 1: mod_base = OTHER; note = 2'-O-methoxyethyl 5-methylcytosine with phosphorothioate linkage
  modified_base 2: mod_base = OTHER; note = 2'-O-methoxyethyl modified nucleotide with phosphorothioate linkage
  modified_base 3: mod_base = OTHER; note = Locked nucleic acid with phosphorothioate linkage
  modified_base 4: mod_base = OTHER; note = 2'-O-methoxyethyl modified nucleotide with phosphorothioate linkage
  modified_base 5: mod_base = OTHER; note = 2'-O-methoxyethyl modified nucleotide with phosphorothioate linkage
  modified_base 6: mod_base = OTHER; note = Nucleotide with phosphorothioate linkage
  modified_base 7: mod_base = OTHER; note = Thymine with phosphorothioate linkage
  modified_base 8: mod_base = OTHER; note = Nucleotide with phosphorothioate linkage
  modified_base 9: mod_base = OTHER; note = Nucleotide with phosphorothioate linkage
  modified_base 10: mod_base = OTHER; note = Nucleotide with phosphorothioate linkage
  modified_base 11: mod_base = OTHER; note = Nucleotide with phosphorothioate linkage
  modified_base 12: mod_base = OTHER; note = 5-methylcytosine with phosphorothioate linkage
  modified_base 13: mod_base = OTHER; note = Nucleotide with phosphorothioate linkage
  modified_base 14: mod_base = OTHER; note = 5-O-methylcyclopropyl modified nucleotide with phosphorothioate linkage
  modified_base 15: mod_base = OTHER; note = Nucleotide with phosphorothioate linkage
  modified_base 16: mod_base = OTHER; note = 2'-O-methoxyethyl modified nucleotide with phosphorothioate linkage
  modified_base 17: mod_base = OTHER; note = 2'-O-methoxyethyl modified thymine with phosphorothioate linkage
  modified_base 18: mod_base = OTHER; note = Locked nucleic acid with phosphorothioate linkage
  modified_base 19: mod_base = OTHER; note = 2'-O-methoxyethyl 5-methylcytosine with phosphorothioate linkage
  modified_base 20: mod_base = OTHER; note = 2'-O-methoxyethyl modified nucleotide
  misc_feature 1..5: note = RNA
  misc_feature 6..13: note = DNA
  misc_feature 14: note = RNA
  misc_feature 15: note = DNA
  misc_feature 16..20: note = RNA
cagaggtgaagcgaagtgca

SEQ ID NO: 898 - DNA, 20 bp, synthetic construct
  source 1..20: mol_type = other DNA
  modified_base 1: mod_base = OTHER; note = 2'-O-methoxyethyl 5-methylcytosine with phosphorothioate linkage
  modified_base 2: mod_base = OTHER; note = 2'-O-methoxyethyl modified nucleotide with phosphorothioate linkage
  modified_base 3: mod_base = OTHER; note = Locked nucleic acid with phosphorothioate linkage
  modified_base 4: mod_base = OTHER; note = 2'-O-methoxyethyl modified nucleotide with phosphorothioate linkage
  modified_base 5: mod_base = OTHER; note = 2'-O-methoxyethyl modified nucleotide with phosphorothioate linkage
  modified_base 6: mod_base = OTHER; note = Nucleotide with phosphorothioate linkage
  modified_base 7: mod_base = OTHER; note = Thymine with phosphorothioate linkage
  modified_base 8: mod_base = OTHER; note = Nucleotide with phosphorothioate linkage
  modified_base 9: mod_base = OTHER; note = Nucleotide with phosphorothioate linkage
  modified_base 10: mod_base = OTHER; note = Nucleotide with phosphorothioate linkage
  modified_base 11: mod_base = OTHER; note = Nucleotide with phosphorothioate linkage
  modified_base 12: mod_base = OTHER; note = 5-methylcytosine with phosphorothioate linkage
  modified_base 13: mod_base = OTHER; note = Nucleotide with phosphorothioate linkage
  modified_base 14: mod_base = OTHER; note = Nucleotide with phosphorothioate linkage
  modified_base 15: mod_base = OTHER; note = 5-O-cyclopropyl modified nucleotide with phosphorothioate linkage
  modified_base 16: mod_base = OTHER; note = 2'-O-methoxyethyl modified nucleotide with phosphorothioate linkage
  modified_base 17: mod_base = OTHER; note = 2'-O-methoxyethyl modified thymine with phosphorothioate linkage
  modified_base 18: mod_base = OTHER; note = Locked nucleic acid with phosphorothioate linkage
  modified_base 19: mod_base = OTHER; note = 2'-O-methoxyethyl 5-methylcytosine with phosphorothioate linkage
  modified_base 20: mod_base = OTHER; note = 2'-O-methoxyethyl modified nucleotide
  misc_feature 1..5: note = RNA
  misc_feature 6..14: note = DNA
  misc_feature 15..20: note = RNA
cagaggtgaagcgaagtgca

SEQ ID NO: 899 - DNA, 20 bp, synthetic construct
  source 1..20: mol_type = other DNA
  modified_base 1: mod_base = OTHER; note = 2'-O-methoxyethyl 5-methylcytosine with phosphorothioate linkage
  modified_base 2: mod_base = OTHER; note = 2'-O-methoxyethyl modified nucleotide with phosphorothioate linkage
  modified_base 3: mod_base = OTHER; note = Locked nucleic acid with phosphorothioate linkage
  modified_base 4: mod_base = OTHER; note = 2'-O-methoxyethyl modified nucleotide with phosphorothioate linkage
  modified_base 5: mod_base = OTHER; note = 2'-O-methoxyethyl modified nucleotide with phosphorothioate linkage
  modified_base 6: mod_base = OTHER; note = Nucleotide with phosphorothioate linkage
  modified_base 7: mod_base = OTHER; note = Thymine with phosphorothioate linkage
  modified_base 8: mod_base = OTHER; note = Nucleotide with phosphorothioate linkage
  modified_base 9: mod_base = OTHER; note = Nucleotide with phosphorothioate linkage
  modified_base 10: mod_base = OTHER; note = Nucleotide with phosphorothioate linkage
  modified_base 11: mod_base = OTHER; note = Nucleotide with phosphorothioate linkage
  modified_base 12: mod_base = OTHER; note = 5-methylcytosine with phosphorothioate linkage
  modified_base 13: mod_base = OTHER; note = Nucleotide with phosphorothioate linkage
  modified_base 14: mod_base = OTHER; note = Nucleotide with phosphorothioate linkage
  modified_base 15: mod_base = OTHER; note = 5-O-cyclopropyl modified nucleotide with phosphorothioate linkage
  modified_base 16: mod_base = OTHER; note = 2'-O-methoxyethyl modified nucleotide with phosphorothioate linkage
  modified_base 17: mod_base = OTHER; note = 2'-O-methoxyethyl modified thymine with phosphorothioate linkage
  modified_base 18: mod_base = OTHER; note = Locked nucleic acid with phosphorothioate linkage
  modified_base 19: mod_base = OTHER; note = 2'-O-methoxyethyl 5-methylcytosine with phosphorothioate linkage
  modified_base 20: mod_base = OTHER; note = 2'-O-methoxyethyl modified nucleotide
  misc_feature 1..5: note = RNA
  misc_feature 6..14: note = DNA
  misc_feature 15..20: note = RNA
cagaggtgaagcgaagtgca

SEQ ID NO: 900 - DNA, 20 bp, synthetic construct
  source 1..20: mol_type = other DNA
  modified_base 1: mod_base = OTHER; note = 2'-O-methoxyethyl 5-methylcytosine with phosphorothioate linkage
  modified_base 2: mod_base = OTHER; note = 2'-O-methoxyethyl modified nucleotide with phosphorothioate linkage
  modified_base 3: mod_base = OTHER; note = Locked nucleic acid with phosphorothioate linkage
  modified_base 4: mod_base = OTHER; note = 2'-O-methoxyethyl modified nucleotide with phosphorothioate linkage
  modified_base 5: mod_base = OTHER; note = 2'-O-methoxyethyl modified nucleotide with phosphorothioate linkage
  modified_base 6: mod_base = OTHER; note = Nucleotide with phosphorothioate linkage
  modified_base 7: mod_base = OTHER; note = Thymine with phosphorothioate linkage
  modified_base 8: mod_base = OTHER; note = Nucleotide with phosphorothioate linkage
  modified_base 9: mod_base = OTHER; note = Nucleotide with phosphorothioate linkage
  modified_base 10: mod_base = OTHER; note = Nucleotide with phosphorothioate linkage
  modified_base 11: mod_base = OTHER; note = Nucleotide with phosphorothioate linkage
  modified_base 12: mod_base = OTHER; note = 5-methylcytosine with phosphorothioate linkage
  modified_base 13: mod_base = OTHER; note = Nucleotide with phosphorothioate linkage
  modified_base 14: mod_base = OTHER; note = Nucleotide with phosphorothioate linkage
  modified_base 15: mod_base = OTHER; note = 5-O-methylcyclopropyl modified nucleotide with phosphorothioate linkage
  modified_base 16: mod_base = OTHER; note = 2'-O-methoxyethyl modified nucleotide with phosphorothioate linkage
  modified_base 17: mod_base = OTHER; note = 2'-O-methoxyethyl modified thymine with phosphorothioate linkage
  modified_base 18: mod_base = OTHER; note = Locked nucleic acid with phosphorothioate linkage
  modified_base 19: mod_base = OTHER; note = 2'-O-methoxyethyl 5-methylcytosine with phosphorothioate linkage
  modified_base 20: mod_base = OTHER; note = 2'-O-methoxyethyl modified nucleotide
  misc_feature 1..5: note = RNA
  misc_feature 6..14: note = DNA
  misc_feature 15..20: note = RNA
cagaggtgaagcgaagtgca

SEQ ID NO: 901 - DNA, 20 bp, synthetic construct
  source 1..20: mol_type = other DNA
  modified_base 1: mod_base = OTHER; note = 2'-O-methoxyethyl 5-methylcytosine with phosphorothioate linkage
  modified_base 2: mod_base = OTHER; note = 2'-O-methoxyethyl modified nucleotide with phosphorothioate linkage
  modified_base 3: mod_base = OTHER; note = Locked nucleic acid with phosphorothioate linkage
  modified_base 4: mod_base = OTHER; note = 2'-O-methoxyethyl modified nucleotide with phosphorothioate linkage
  modified_base 5: mod_base = OTHER; note = 2'-O-methoxyethyl modified nucleotide with phosphorothioate linkage
  modified_base 6: mod_base = OTHER; note = Nucleotide with phosphorothioate linkage
  modified_base 7: mod_base = OTHER; note = Thymine with phosphorothioate linkage
  modified_base 8: mod_base = OTHER; note = Nucleotide with phosphorothioate linkage
  modified_base 9: mod_base = OTHER; note = Nucleotide with phosphorothioate linkage
  modified_base 10: mod_base = OTHER; note = Nucleotide with phosphorothioate linkage
  modified_base 11: mod_base = OTHER; note = Nucleotide with phosphorothioate linkage
  modified_base 12: mod_base = OTHER; note = 5-methylcytosine with phosphorothioate linkage
  modified_base 13: mod_base = OTHER; note = Nucleotide with phosphorothioate linkage
  modified_base 14: mod_base = OTHER; note = Nucleotide with phosphorothioate linkage
  modified_base 15: mod_base = OTHER; note = 5-O-methylcyclopropyl modified nucleotide with phosphorothioate linkage
  modified_base 16: mod_base = OTHER; note = 2'-O-methoxyethyl modified nucleotide with phosphorothioate linkage
  modified_base 17: mod_base = OTHER; note = 2'-O-methoxyethyl modified thymine with phosphorothioate linkage
  modified_base 18: mod_base = OTHER; note = Locked nucleic acid with phosphorothioate linkage
  modified_base 19: mod_base = OTHER; note = 2'-O-methoxyethyl 5-methylcytosine with phosphorothioate linkage
  modified_base 20: mod_base = OTHER; note = 2'-O-methoxyethyl modified nucleotide
  misc_feature 1..5: note = RNA
  misc_feature 6..14: note = DNA
  misc_feature 15..20: note = RNA
cagaggtgaagcgaagtgca

SEQ ID NO: 902 - DNA, 20 bp, synthetic construct
  source 1..20: mol_type = other DNA
  modified_base 1: mod_base = OTHER; note = 2'-O-methoxyethyl modified nucleotide with phosphorothioate linkage
  modified_base 2: mod_base = OTHER; note = 2'-O-methoxyethyl 5-methylcytosine with phosphorothioate linkage
  modified_base 3: mod_base = OTHER; note = 2'-O-methoxyethyl modified nucleotide with phosphorothioate linkage
  modified_base 4: mod_base = OTHER; note = 2'-O-methoxyethyl modified nucleotide with phosphorothioate linkage
  modified_base 5: mod_base = OTHER; note = 2'-O-methoxyethyl modified nucleotide with phosphorothioate linkage
  modified_base 6: mod_base = OTHER; note = Nucleotide with phosphorothioate linkage
  modified_base 7: mod_base = OTHER; note = Nucleotide with phosphorothioate linkage
  modified_base 8: mod_base = OTHER; note = Thymine with phosphorothioate linkage
  modified_base 9: mod_base = OTHER; note = Nucleotide with phosphorothioate linkage
  modified_base 10: mod_base = OTHER; note = Nucleotide with phosphorothioate linkage
  modified_base 11: mod_base = OTHER; note = Nucleotide with phosphorothioate linkage
  modified_base 12: mod_base = OTHER; note = Nucleotide with phosphorothioate linkage
  modified_base 13: mod_base = OTHER; note = 5-methylcytosine with phosphorothioate linkage
  modified_base 14: mod_base = OTHER; note = Nucleotide with phosphorothioate linkage
  modified_base 15: mod_base = OTHER; note = Nucleotide with phosphorothioate linkage
  modified_base 16: mod_base = OTHER; note = 2'-O-methoxyethyl modified nucleotide with phosphorothioate linkage
  modified_base 17: mod_base = OTHER; note = 2'-O-methoxyethyl modified nucleotide with phosphorothioate linkage
  modified_base 18: mod_base = OTHER; note = 2'-O-methoxyethyl modified thymine with phosphorothioate linkage
  modified_base 19: mod_base = OTHER; note = 2'-O-methoxyethyl modified nucleotide with phosphorothioate linkage
  modified_base 20: mod_base = OTHER; note = 2'-O-methoxyethyl 5-methylcytosine
  misc_feature 1..5: note = RNA
  misc_feature 6..15: note = DNA
  misc_feature 16..20: note = RNA
gcagaggtgaagcggagtgc

SEQ ID NO: 903 - DNA, 20 bp, synthetic construct
  source 1..20: mol_type = other DNA
  modified_base 1: mod_base = OTHER; note = 2'-O-methoxyethyl modified nucleotide with phosphorothioate linkage
  modified_base 2: mod_base = OTHER; note = 2'-O-methoxyethyl 5-methylcytosine with phosphorothioate linkage
  modified_base 3: mod_base = OTHER; note = 2'-O-methoxyethyl modified nucleotide with phosphorothioate linkage
  modified_base 4: mod_base = OTHER; note = 2'-O-methoxyethyl modified nucleotide with phosphorothioate linkage
  modified_base 5: mod_base = OTHER; note = 2'-O-methoxyethyl modified nucleotide with phosphorothioate linkage
  modified_base 6: mod_base = OTHER; note = Nucleotide with phosphorothioate linkage
  modified_base 7: mod_base = OTHER; note = Nucleotide with phosphorothioate linkage
  modified_base 8: mod_base = OTHER; note = Thymine with phosphorothioate linkage
  modified_base 9: mod_base = OTHER; note = Nucleotide with phosphorothioate linkage
  modified_base 10: mod_base = OTHER; note = Nucleotide with phosphorothioate linkage
  modified_base 11: mod_base = OTHER; note = Nucleotide with phosphorothioate linkage
  modified_base 12: mod_base = OTHER; note = Nucleotide with phosphorothioate linkage
  modified_base 13: mod_base = OTHER; note = 5-methylcytosine with phosphorothioate linkage
  modified_base 14: mod_base = OTHER; note = Nucleotide with phosphorothioate linkage
  modified_base 15: mod_base = OTHER; note = Thymine with phosphorothioate linkage
  modified_base 16: mod_base = OTHER; note = 2'-O-methoxyethyl modified nucleotide with phosphorothioate linkage
  modified_base 17: mod_base = OTHER; note = 2'-O-methoxyethyl modified nucleotide with phosphorothioate linkage
  modified_base 18: mod_base = OTHER; note = 2'-O-methoxyethyl modified thymine with phosphorothioate linkage
  modified_base 19: mod_base = OTHER; note = 2'-O-methoxyethyl modified nucleotide with phosphorothioate linkage
  modified_base 20: mod_base = OTHER; note = 2'-O-methoxyethyl 5-methylcytosine
  misc_feature 1..5: note = RNA
  misc_feature 6..15: note = DNA
  misc_feature 16..20: note = RNA
gcagaggtgaagcgtagtgc

SEQ ID NO: 904 - DNA, 20 bp, synthetic construct
  source 1..20: mol_type = other DNA
  modified_base 1: mod_base = OTHER; note = 2'-O-methoxyethyl modified nucleotide with phosphorothioate linkage
  modified_base 2: mod_base = OTHER; note = 2'-O-methoxyethyl 5-methylcytosine with phosphorothioate linkage
  modified_base 3: mod_base = OTHER; note = 2'-O-methoxyethyl modified nucleotide with phosphorothioate linkage
  modified_base 4: mod_base = OTHER; note = 2'-O-methoxyethyl modified nucleotide with phosphorothioate linkage
  modified_base 5: mod_base = OTHER; note = 2'-O-methoxyethyl modified nucleotide with phosphorothioate linkage
  modified_base 6: mod_base = OTHER; note = Nucleotide with phosphorothioate linkage
  modified_base 7: mod_base = OTHER; note = Nucleotide with phosphorothioate linkage
  modified_base 8: mod_base = OTHER; note = Thymine with phosphorothioate linkage
  modified_base 9: mod_base = OTHER; note = Nucleotide with phosphorothioate linkage
  modified_base 10: mod_base = OTHER; note = Nucleotide with phosphorothioate linkage
  modified_base 11: mod_base = OTHER; note = Nucleotide with phosphorothioate linkage
  modified_base 12: mod_base = OTHER; note = Nucleotide with phosphorothioate linkage
  modified_base 13: mod_base = OTHER; note = 5-methylcytosine with phosphorothioate linkage
  modified_base 14: mod_base = OTHER; note = Nucleotide with phosphorothioate linkage
  modified_base 15: mod_base = OTHER; note = 5-methylcytosine with phosphorothioate linkage
  modified_base 16: mod_base = OTHER; note = 2'-O-methoxyethyl modified nucleotide with phosphorothioate linkage
  modified_base 17: mod_base = OTHER; note = 2'-O-methoxyethyl modified nucleotide with phosphorothioate linkage
  modified_base 18: mod_base = OTHER; note = 2'-O-methoxyethyl modified thymine with phosphorothioate linkage
  modified_base 19: mod_base = OTHER; note = 2'-O-methoxyethyl modified nucleotide with phosphorothioate linkage
  modified_base 20: mod_base = OTHER; note = 2'-O-methoxyethyl 5-methylcytosine
  misc_feature 1..5: note = RNA
  misc_feature 6..15: note = DNA
  misc_feature 16..20: note = RNA
gcagaggtgaagcgcagtgc

SEQ ID NO: 905 - DNA, 20 bp, synthetic construct
  source 1..20: mol_type = other DNA
  modified_base 1: mod_base = OTHER; note = 2'-O-methoxyethyl modified nucleotide with phosphorothioate linkage
  modified_base 2: mod_base = OTHER; note = 2'-O-methoxyethyl 5-methylcytosine with phosphorothioate linkage
  modified_base 3: mod_base = OTHER; note = 2'-O-methoxyethyl modified nucleotide with phosphorothioate linkage
  modified_base 4: mod_base = OTHER; note = 2'-O-methoxyethyl modified nucleotide with phosphorothioate linkage
  modified_base 5: mod_base = OTHER; note = 2'-O-methoxyethyl modified nucleotide with phosphorothioate linkage
  modified_base 6: mod_base = OTHER; note = Nucleotide with phosphorothioate linkage
  modified_base 7: mod_base = OTHER; note = Nucleotide with phosphorothioate linkage
  modified_base 8: mod_base = OTHER; note = Thymine with phosphorothioate linkage
  modified_base 9: mod_base = OTHER; note = Nucleotide with phosphorothioate linkage
  modified_base 10: mod_base = OTHER; note = Nucleotide with phosphorothioate linkage
  modified_base 11: mod_base = OTHER; note = Nucleotide with phosphorothioate linkage
  modified_base 12: mod_base = OTHER; note = Nucleotide with phosphorothioate linkage
  modified_base 13: mod_base = OTHER; note = 5-methylcytosine with phosphorothioate linkage
  modified_base 14: mod_base = OTHER; note = Nucleotide with phosphorothioate linkage
  modified_base 15: mod_base = OTHER; note = Nucleotide with phosphorothioate linkage
  modified_base 16: mod_base = OTHER; note = 2'-O-methoxyethyl modified nucleotide with phosphorothioate linkage
  modified_base 17: mod_base = OTHER; note = 2'-O-methoxyethyl modified nucleotide with phosphorothioate linkage
  modified_base 18: mod_base = OTHER; note = 2'-O-methoxyethyl modified thymine with phosphorothioate linkage
  modified_base 19: mod_base = OTHER; note = 2'-O-methoxyethyl modified nucleotide with phosphorothioate linkage
  modified_base 20: mod_base = OTHER; note = 2'-O-methoxyethyl 5-methylcytosine
  misc_feature 1..5: note = RNA
  misc_feature 6..15: note = DNA
  misc_feature 16..20: note = RNA
gcagaggtgaagcaaagtgc

SEQ ID NO: 906 - DNA, 20 bp, synthetic construct
  source 1..20: mol_type = other DNA
  modified_base 1: mod_base = OTHER; note = 2'-O-methoxyethyl modified nucleotide with phosphorothioate linkage
  modified_base 2: mod_base = OTHER; note = 2'-O-methoxyethyl 5-methylcytosine with phosphorothioate linkage
  modified_base 3: mod_base = OTHER; note = 2'-O-methoxyethyl modified nucleotide with phosphorothioate linkage
  modified_base 4: mod_base = OTHER; note = 2'-O-methoxyethyl modified nucleotide with phosphorothioate linkage
  modified_base 5: mod_base = OTHER; note = 2'-O-methoxyethyl modified nucleotide with phosphorothioate linkage
  modified_base 6: mod_base = OTHER; note = Nucleotide with phosphorothioate linkage
  modified_base 7: mod_base = OTHER; note = Nucleotide with phosphorothioate linkage
  modified_base 8: mod_base = OTHER; note = Thymine with phosphorothioate linkage
  modified_base 9: mod_base = OTHER; note = Nucleotide with phosphorothioate linkage
  modified_base 10: mod_base = OTHER; note = Nucleotide with phosphorothioate linkage
  modified_base 11: mod_base = OTHER; note = Nucleotide with phosphorothioate linkage
  modified_base 12: mod_base = OTHER; note = Nucleotide with phosphorothioate linkage
  modified_base 13: mod_base = OTHER; note = 5-methylcytosine with phosphorothioate linkage
  modified_base 14: mod_base = OTHER; note = Thymine with phosphorothioate linkage
  modified_base 15: mod_base = OTHER; note = Nucleotide with phosphorothioate linkage
  modified_base 16: mod_base = OTHER; note = 2'-O-methoxyethyl modified nucleotide with phosphorothioate linkage
  modified_base 17: mod_base = OTHER; note = 2'-O-methoxyethyl modified nucleotide with phosphorothioate linkage
  modified_base 18: mod_base = OTHER; note = 2'-O-methoxyethyl modified thymine with phosphorothioate linkage
  modified_base 19: mod_base = OTHER; note = 2'-O-methoxyethyl modified nucleotide with phosphorothioate linkage
  modified_base 20: mod_base = OTHER; note = 2'-O-methoxyethyl 5-methylcytosine
  misc_feature 1..5: note = RNA
  misc_feature 6..15: note = DNA
  misc_feature 16..20: note = RNA
gcagaggtgaagctaagtgc

SEQ ID NO: 907 - DNA, 20 bp, synthetic construct
  source 1..20: mol_type = other DNA
  modified_base 1: mod_base = OTHER; note = 2'-O-methoxyethyl modified nucleotide with phosphorothioate linkage
  modified_base 2: mod_base = OTHER; note = 2'-O-methoxyethyl 5-methylcytosine with phosphorothioate linkage
  modified_base 3: mod_base = OTHER; note = 2'-O-methoxyethyl modified nucleotide with phosphorothioate linkage
  modified_base 4: mod_base = OTHER; note = 2'-O-methoxyethyl modified nucleotide with phosphorothioate linkage
  modified_base 5: mod_base = OTHER; note = 2'-O-methoxyethyl modified nucleotide with phosphorothioate linkage
  modified_base 6: mod_base = OTHER; note = Nucleotide with phosphorothioate linkage
  modified_base 7: mod_base = OTHER; note = Nucleotide with phosphorothioate linkage
  modified_base 8: mod_base = OTHER; note = Thymine with phosphorothioate linkage
  modified_base 9: mod_base = OTHER; note = Nucleotide with phosphorothioate linkage
  modified_base 10: mod_base = OTHER; note = Nucleotide with phosphorothioate linkage
  modified_base 11: mod_base = OTHER; note = Nucleotide with phosphorothioate linkage
  modified_base 12: mod_base = OTHER; note = Nucleotide with phosphorothioate linkage
  modified_base 13: mod_base = OTHER; note = 5-methylcytosine with phosphorothioate linkage
  modified_base 14: mod_base = OTHER; note = 5-methylcytosine with phosphorothioate linkage
  modified_base 15: mod_base = OTHER; note = Nucleotide with phosphorothioate linkage
  modified_base 16: mod_base = OTHER; note = 2'-O-methoxyethyl modified nucleotide with phosphorothioate linkage
  modified_base 17: mod_base = OTHER; note = 2'-O-methoxyethyl modified nucleotide with phosphorothioate linkage
  modified_base 18: mod_base = OTHER; note = 2'-O-methoxyethyl modified thymine with phosphorothioate linkage
  modified_base 19: mod_base = OTHER; note = 2'-O-methoxyethyl modified nucleotide with phosphorothioate linkage
  modified_base 20: mod_base = OTHER; note = 2'-O-methoxyethyl 5-methylcytosine
  misc_feature 1..5: note = RNA
  misc_feature 6..15: note = DNA
  misc_feature 16..20: note = RNA
gcagaggtgaagccaagtgc

SEQ ID NO: 908 - DNA, 20 bp, synthetic construct
  source 1..20: mol_type = other DNA
  modified_base 1: mod_base = OTHER; note = 2'-O-methoxyethyl modified nucleotide with phosphorothioate linkage
  modified_base 2: mod_base = OTHER; note = 2'-O-methoxyethyl 5-methylcytosine with phosphorothioate linkage
  modified_base 3: mod_base = OTHER; note = 2'-O-methoxyethyl modified nucleotide with phosphorothioate linkage
  modified_base 4: mod_base = OTHER; note = 2'-O-methoxyethyl modified nucleotide with phosphorothioate linkage
  modified_base 5: mod_base = OTHER; note = 2'-O-methoxyethyl modified nucleotide with phosphorothioate linkage
  modified_base 6: mod_base = OTHER; note = Nucleotide with phosphorothioate linkage
  modified_base 7: mod_base = OTHER; note = Nucleotide with phosphorothioate linkage
  modified_base 8: mod_base = OTHER; note = Thymine with phosphorothioate linkage
  modified_base 9: mod_base = OTHER; note = Nucleotide with phosphorothioate linkage
  modified_base 10: mod_base = OTHER; note = Nucleotide with phosphorothioate linkage
  modified_base 11: mod_base = OTHER; note = Nucleotide with phosphorothioate linkage
  modified_base 12: mod_base = OTHER; note = Nucleotide with phosphorothioate linkage
  modified_base 13: mod_base = OTHER; note = Nucleotide with phosphorothioate linkage
  modified_base 14: mod_base = OTHER; note = Nucleotide with phosphorothioate linkage
  modified_base 15: mod_base = OTHER; note = Nucleotide with phosphorothioate linkage
  modified_base 16: mod_base = OTHER; note = 2'-O-methoxyethyl modified nucleotide with phosphorothioate linkage
  modified_base 17: mod_base = OTHER; note = 2'-O-methoxyethyl modified nucleotide with phosphorothioate linkage
  modified_base 18: mod_base = OTHER; note = 2'-O-methoxyethyl modified thymine with phosphorothioate linkage
  modified_base 19: mod_base = OTHER; note = 2'-O-methoxyethyl modified nucleotide with phosphorothioate linkage
  modified_base 20: mod_base = OTHER; note = 2'-O-methoxyethyl 5-methylcytosine
  misc_feature 1..5: note = RNA
  misc_feature 6..15: note = DNA
  misc_feature 16..20: note = RNA
gcagaggtgaagagaagtgc

SEQ ID NO: 909 - DNA, 20 bp, synthetic construct
  source 1..20: mol_type = other DNA
  modified_base 1: mod_base = OTHER; note = 2'-O-methoxyethyl modified nucleotide with phosphorothioate linkage
  modified_base 2: mod_base = OTHER; note = 2'-O-methoxyethyl 5-methylcytosine with phosphorothioate linkage
  modified_base 3: mod_base = OTHER; note = 2'-O-methoxyethyl modified nucleotide with phosphorothioate linkage
  modified_base 4: mod_base = OTHER; note = 2'-O-methoxyethyl modified nucleotide with phosphorothioate linkage
  modified_base 5: mod_base = OTHER; note = 2'-O-methoxyethyl modified nucleotide with phosphorothioate linkage
  modified_base 6: mod_base = OTHER; note = Nucleotide with phosphorothioate linkage
  modified_base 7: mod_base = OTHER; note = Nucleotide with phosphorothioate linkage
  modified_base 8: mod_base = OTHER; note = Thymine with phosphorothioate linkage
  modified_base 9: mod_base = OTHER; note = Nucleotide with phosphorothioate linkage
  modified_base 10: mod_base = OTHER; note = Nucleotide with phosphorothioate linkage
  modified_base 11: mod_base = OTHER; note = Nucleotide with phosphorothioate linkage
  modified_base 12: mod_base = OTHER; note = Nucleotide with phosphorothioate linkage
  modified_base 13: mod_base = OTHER; note = Thymine with phosphorothioate linkage
  modified_base 14: mod_base = OTHER; note = Nucleotide with phosphorothioate linkage
  modified_base 15: mod_base = OTHER; note = Nucleotide with phosphorothioate linkage
  modified_base 16: mod_base = OTHER; note = 2'-O-methoxyethyl modified nucleotide with phosphorothioate linkage
  modified_base 17: mod_base = OTHER; note = 2'-O-methoxyethyl modified nucleotide with phosphorothioate linkage
  modified_base 18: mod_base = OTHER; note = 2'-O-methoxyethyl modified thymine with phosphorothioate linkage
  modified_base 19: mod_base = OTHER; note = 2'-O-methoxyethyl modified nucleotide with phosphorothioate linkage
  modified_base 20: mod_base = OTHER; note = 2'-O-methoxyethyl 5-methylcytosine
  misc_feature 1..5: note = RNA
  misc_feature 6..15: note = DNA
  misc_feature 16..20: note = RNA
gcagaggtgaagtgaagtgc

SEQ ID NO: 910 - DNA, 20 bp, synthetic construct
  source 1..20: mol_type = other DNA
  modified_base 1: mod_base = OTHER; note = 2'-O-methoxyethyl modified nucleotide with phosphorothioate linkage
  modified_base 2: mod_base = OTHER; note = 2'-O-methoxyethyl 5-methylcytosine with phosphorothioate linkage
  modified_base 3: mod_base = OTHER; note = 2'-O-methoxyethyl modified nucleotide with phosphorothioate linkage
  modified_base 4: mod_base = OTHER; note = 2'-O-methoxyethyl modified nucleotide with phosphorothioate linkage
  modified_base 5: mod_base = OTHER; note = 2'-O-methoxyethyl modified nucleotide with phosphorothioate linkage
  modified_base 6: mod_base = OTHER; note = Nucleotide with phosphorothioate linkage
  modified_base 7: mod_base = OTHER; note = Nucleotide with phosphorothioate linkage
  modified_base 8: mod_base = OTHER; note = Thymine with phosphorothioate linkage
  modified_base 9: mod_base = OTHER; note = Nucleotide with phosphorothioate linkage
  modified_base 10: mod_base = OTHER; note = Nucleotide with phosphorothioate linkage
  modified_base 11: mod_base = OTHER; note = Nucleotide with phosphorothioate linkage
  modified_base 12: mod_base = OTHER; note = Nucleotide with phosphorothioate linkage
  modified_base 13: mod_base = OTHER; note = Nucleotide with phosphorothioate linkage
  modified_base 14: mod_base = OTHER; note = Nucleotide with phosphorothioate linkage
  modified_base 15: mod_base = OTHER; note = Nucleotide with phosphorothioate linkage
  modified_base 16: mod_base = OTHER; note = 2'-O-methoxyethyl modified nucleotide with phosphorothioate linkage
  modified_base 17: mod_base = OTHER; note = 2'-O-methoxyethyl modified nucleotide with phosphorothioate linkage
  modified_base 18: mod_base = OTHER; note = 2'-O-methoxyethyl modified thymine with phosphorothioate linkage
  modified_base 19: mod_base = OTHER; note = 2'-O-methoxyethyl modified nucleotide with phosphorothioate linkage
  modified_base 20: mod_base = OTHER; note = 2'-O-methoxyethyl 5-methylcytosine
  misc_feature 1..5: note = RNA
  misc_feature 6..15: note = DNA
  misc_feature 16..20: note = RNA
gcagaggtgaagggaagtgc

SEQ ID NO: 911 - DNA, 20 bp, synthetic construct
  source 1..20: mol_type = other DNA
  modified_base 1: mod_base = OTHER; note = 2'-O-methoxyethyl modified nucleotide with phosphorothioate linkage
  modified_base 2: mod_base = OTHER; note = 2'-O-methoxyethyl 5-methylcytosine with phosphorothioate linkage
  modified_base 3: mod_base = OTHER; note = 2'-O-methoxyethyl modified nucleotide with phosphorothioate linkage
  modified_base 4: mod_base = OTHER; note = 2'-O-methoxyethyl modified nucleotide with phosphorothioate linkage
  modified_base 5: mod_base = OTHER; note = 2'-O-methoxyethyl modified nucleotide with phosphorothioate linkage
  modified_base 6: mod_base = OTHER; note = Nucleotide with phosphorothioate linkage
  modified_base 7: mod_base = OTHER; note = Nucleotide with phosphorothioate linkage
  modified_base 8: mod_base = OTHER; note = Thymine with phosphorothioate linkage
  modified_base 9: mod_base = OTHER; note = Nucleotide with phosphorothioate linkage
  modified_base 10: mod_base = OTHER; note = Nucleotide with phosphorothioate linkage
  modified_base 11: mod_base = OTHER; note = Nucleotide with phosphorothioate linkage
  modified_base 12: mod_base = OTHER; note = Nucleotide with phosphorothioate linkage
  modified_base 13: mod_base = OTHER; note = 5-methylcytosine with phosphorothioate linkage
  modified_base 14: mod_base = OTHER; note = Nucleotide with phosphorothioate linkage
  modified_base 15: mod_base = OTHER; note = Nucleotide with phosphorothioate linkage
  modified_base 16: mod_base = OTHER; note = 2'-O-methyl modified abasic nucleotide with phosphorothioate linkage
  modified_base 17: mod_base = OTHER; note = 2'-O-methoxyethyl modified nucleotide with phosphorothioate linkage
  modified_base 18: mod_base = OTHER; note = 2'-O-methoxyethyl modified thymine with phosphorothioate linkage
  modified_base 19: mod_base = OTHER; note = 2'-O-methoxyethyl modified nucleotide with phosphorothioate linkage
  modified_base 20: mod_base = OTHER; note = 2'-O-methoxyethyl 5-methylcytosine
  misc_feature 1..5: note = RNA
  misc_feature 6..15: note = DNA
  misc_feature 16..20: note = RNA
gcagaggtgaagcgangtgc

SEQ ID NO: 912 - DNA, 20 bp, synthetic construct
  source 1..20: mol_type = other DNA
  modified_base 1: mod_base = OTHER; note = 2'-O-methoxyethyl modified nucleotide with phosphorothioate linkage
  modified_base 2: mod_base = OTHER; note = 2'-O-methoxyethyl 5-methylcytosine with phosphorothioate linkage
  modified_base 3: mod_base = OTHER; note = 2'-O-methoxyethyl modified nucleotide with phosphorothioate linkage
  modified_base 4: mod_base = OTHER; note = 2'-O-methoxyethyl modified nucleotide with phosphorothioate linkage
  modified_base 5: mod_base = OTHER; note = 2'-O-methoxyethyl modified nucleotide with phosphorothioate linkage
  modified_base 6: mod_base = OTHER; note = Nucleotide with phosphorothioate linkage
  modified_base 7: mod_base = OTHER; note = Nucleotide with phosphorothioate linkage
  modified_base 8: mod_base = OTHER; note = Thymine with phosphorothioate linkage
  modified_base 9: mod_base = OTHER; note = Nucleotide with phosphorothioate linkage
  modified_base 10: mod_base = OTHER; note = Nucleotide with phosphorothioate linkage
  modified_base 11: mod_base = OTHER; note = Nucleotide with phosphorothioate linkage
  modified_base 12: mod_base = OTHER; note = Nucleotide with phosphorothioate linkage
  modified_base 13: mod_base = OTHER; note = 5-methylcytosine with phosphorothioate linkage
  modified_base 14: mod_base = OTHER; note = Nucleotide with phosphorothioate linkage
  modified_base 15: mod_base = OTHER; note = Nucleotide with phosphorothioate linkage
  modified_base 16: mod_base = OTHER; note = 2'-O-methoxyethyl modified nucleotide with phosphorothioate linkage
  modified_base 17: mod_base = OTHER; note = 2'-O-methyl modified abasic nucleotide with phosphorothioate linkage
  modified_base 18: mod_base = OTHER; note = 2'-O-methoxyethyl modified thymine with phosphorothioate linkage
  modified_base 19: mod_base = OTHER; note = 2'-O-methoxyethyl modified nucleotide with phosphorothioate linkage
  modified_base 20: mod_base = OTHER; note = 2'-O-methoxyethyl 5-methylcytosine
  misc_feature 1..5: note = RNA
  misc_feature 6..15: note = DNA
  misc_feature 16..20: note = RNA
gcagaggtgaagcgaantgc

SEQ ID NO: 913 - DNA, 20 bp, synthetic construct
  source 1..20: mol_type = other DNA
  modified_base 1: mod_base = OTHER; note = 2'-O-methoxyethyl modified nucleotide with phosphorothioate linkage
  modified_base 2: mod_base = OTHER; note = 2'-O-methoxyethyl 5-methylcytosine with phosphorothioate linkage
  modified_base 3: mod_base = OTHER; note = 2'-O-methoxyethyl modified nucleotide with phosphorothioate linkage
  modified_base 4: mod_base = OTHER; note = 2'-O-methoxyethyl modified nucleotide with phosphorothioate linkage
  modified_base 5: mod_base = OTHER; note = 2'-O-methoxyethyl modified nucleotide with phosphorothioate linkage
  modified_base 6: mod_base = OTHER; note = Nucleotide with phosphorothioate linkage
  modified_base 7: mod_base = OTHER; note = Nucleotide with phosphorothioate linkage
  modified_base 8: mod_base = OTHER; note = Thymine with phosphorothioate linkage
  modified_base 9: mod_base = OTHER; note = Nucleotide with phosphorothioate linkage
  modified_base 10: mod_base = OTHER; note = Nucleotide with phosphorothioate linkage
  modified_base 11: mod_base = OTHER; note = Nucleotide with phosphorothioate linkage
  modified_base 12: mod_base = OTHER; note = Nucleotide with phosphorothioate linkage
  modified_base 13: mod_base = OTHER; note = 5-methylcytosine with phosphorothioate linkage
  modified_base 14: mod_base = OTHER; note = Nucleotide with phosphorothioate linkage
  modified_base 15: mod_base = OTHER; note = Nucleotide with phosphorothioate linkage
  modified_base 16: mod_base = OTHER; note = 2'-O-methoxyethyl modified nucleotide with phosphorothioate linkage
  modified_base 17: mod_base = OTHER; note = 2'-O-methoxyethyl modified nucleotide with phosphorothioate linkage
  modified_base 18: mod_base = OTHER; note = 2'-O-methyl modified abasic nucleotide with phosphorothioate linkage
  modified_base 19: mod_base = OTHER; note = 2'-O-methoxyethyl modified nucleotide with phosphorothioate linkage
  modified_base 20: mod_base = OTHER; note = 2'-O-methoxyethyl 5-methylcytosine
  misc_feature 1..5: note = RNA
  misc_feature 6..15: note = DNA
  misc_feature 16..20: note = RNA
gcagaggtgaagcgaagngc

SEQ ID NO: 914 - DNA, 20 bp, synthetic construct
  source 1..20: mol_type = other DNA
  modified_base 1: mod_base = OTHER; note = 2'-O-methoxyethyl modified nucleotide with phosphorothioate linkage
  modified_base 2: mod_base = OTHER; note = 2'-O-methoxyethyl 5-methylcytosine with phosphorothioate linkage
  modified_base 3: mod_base = OTHER; note = 2'-O-methoxyethyl modified nucleotide with phosphorothioate linkage
  modified_base 4: mod_base = OTHER; note = 2'-O-methoxyethyl modified nucleotide with phosphorothioate linkage
  modified_base 5: mod_base = OTHER; note = 2'-O-methoxyethyl modified nucleotide with phosphorothioate linkage
  modified_base 6: mod_base = OTHER; note = Nucleotide with phosphorothioate linkage
  modified_base 7: mod_base = OTHER; note = Nucleotide with phosphorothioate linkage
  modified_base 8: mod_base = OTHER; note = Thymine with phosphorothioate linkage
  modified_base 9: mod_base = OTHER; note = Nucleotide with phosphorothioate linkage
  modified_base 10: mod_base = OTHER; note = Nucleotide with phosphorothioate linkage
  modified_base 11: mod_base = OTHER; note = Nucleotide with phosphorothioate linkage
  modified_base 12: mod_base = OTHER; note = Nucleotide with phosphorothioate linkage
  modified_base 13: mod_base = OTHER; note = 5-methylcytosine with phosphorothioate linkage
  modified_base 14: mod_base = OTHER; note = Nucleotide with phosphorothioate linkage
  modified_base 15: mod_base = OTHER; note = Nucleotide with phosphorothioate linkage
  modified_base 16: mod_base = OTHER; note = 2'-O-methoxyethyl modified nucleotide with phosphorothioate linkage
  modified_base 17: mod_base = OTHER; note = 2'-O-methoxyethyl modified nucleotide with phosphorothioate linkage
  modified_base 18: mod_base = OTHER; note = 2'-O-methoxyethyl modified thymine with phosphorothioate linkage
  modified_base 19: mod_base = OTHER; note = 2'-O-methoxyethyl modified nucleotide with phosphorothioate linkage
  modified_base 20: mod_base = OTHER; note = 2'-O-methyl modified abasic nucleotide
  misc_feature 1..5: note = RNA
  misc_feature 6..15: note = DNA
  misc_feature 16..20: note = RNA
gcagaggtgaagcgaagtgn

SEQ ID NO: 915 - DNA, 21 bp, synthetic construct
  source 1..21: mol_type = other DNA
  modified_base 1: mod_base = OTHER; note = Nucleotide with phosphorothioate linkage
  modified_base 2: mod_base = OTHER; note = Nucleotide with phosphorothioate linkage
  modified_base 3: mod_base = OTHER; note = Nucleotide with phosphorothioate linkage
  modified_base 4: mod_base = OTHER; note = Thymine with phosphorothioate linkage
  modified_base 5: mod_base = OTHER; note = Nucleotide with phosphorothioate linkage
  modified_base 6: mod_base = OTHER; note = 2'-O-methoxyethyl modified nucleotide with phosphorothioate linkage
  modified_base 7: mod_base = OTHER; note = Nucleotide with phosphorothioate linkage
  modified_base 8: mod_base = OTHER; note = Nucleotide with phosphorothioate linkage
  modified_base 9: mod_base = OTHER; note = 5-methylcytosine with phosphorothioate linkage
  modified_base 10: mod_base = OTHER; note = Nucleotide with phosphorothioate linkage
  modified_base 11: mod_base = OTHER; note = Nucleotide with phosphorothioate linkage
  modified_base 12: mod_base = OTHER; note = 2'-O-methoxyethyl modified nucleotide with phosphorothioate linkage
  modified_base 13: mod_base = OTHER; note = 2'-O-methoxyethyl modified nucleotide with phosphorothioate linkage
  modified_base 14: mod_base = OTHER; note = 2'-O-methoxyethyl modified thymine with phosphorothioate linkage
  modified_base 15: mod_base = OTHER; note = 2'-O-methoxyethyl modified nucleotide with phosphorothioate linkage
  modified_base 16: mod_base = OTHER; note = 2'-O-methoxyethyl 5-methylcytosine with phosphorothioate linkage
  modified_base 17: mod_base = OTHER; note = 2'-O-methoxyethyl modified nucleotide with phosphorothioate linkage
  modified_base 18: mod_base = OTHER; note = 2'-O-methoxyethyl 5-methylcytosine with phosphorothioate linkage
  modified_base 19: mod_base = OTHER; note = 2'-O-methoxyethyl modified nucleotide with phosphorothioate linkage
  modified_base 20: mod_base = OTHER; note = 2'-O-methoxyethyl 5-methylcytosine with phosphorothioate linkage
  modified_base 21: mod_base = OTHER; note = 2'-O-methoxyethyl modified nucleotide
  misc_feature 1..5: note = DNA
  misc_feature 6: note = RNA
  misc_feature 7..11: note = DNA
  misc_feature 12..21: note = RNA
aggtgaagcgaagtgcacacg

SEQ ID NO: 916 - DNA, 21 bp, synthetic construct
  source 1..21: mol_type = other DNA
  modified_base 1: mod_base = OTHER; note = 2'-O-methoxyethyl modified nucleotide with phosphorothioate linkage
  modified_base 2: mod_base = OTHER; note = Nucleotide with phosphorothioate linkage
  modified_base 3: mod_base = OTHER; note = Nucleotide with phosphorothioate linkage
  modified_base 4: mod_base = OTHER; note = Nucleotide with phosphorothioate linkage
  modified_base 5: mod_base = OTHER; note = Thymine with phosphorothioate linkage
  modified_base 6: mod_base = OTHER; note = Nucleotide with phosphorothioate linkage
  modified_base 7: mod_base = OTHER; note = 2'-O-methoxyethyl modified nucleotide with phosphorothioate linkage
  modified_base 8: mod_base = OTHER; note = Nucleotide with phosphorothioate linkage
  modified_base 9: mod_base = OTHER; note = Nucleotide with phosphorothioate linkage
  modified_base 10: mod_base = OTHER; note = 5-methylcytosine with phosphorothioate linkage
  modified_base 11: mod_base = OTHER; note = Nucleotide with phosphorothioate linkage
  modified_base 12: mod_base = OTHER; note = Nucleotide with phosphorothioate linkage
  modified_base 13: mod_base = OTHER; note = 2'-O-methoxyethyl modified nucleotide with phosphorothioate linkage
  modified_base 14: mod_base = OTHER; note = 2'-O-methoxyethyl modified nucleotide with phosphorothioate linkage
  modified_base 15: mod_base = OTHER; note = 2'-O-methoxyethyl modified thymine with phosphorothioate linkage
  modified_base 16: mod_base = OTHER; note = 2'-O-methoxyethyl modified nucleotide with phosphorothioate linkage
  modified_base 17: mod_base = OTHER; note = 2'-O-methoxyethyl 5-methylcytosine with phosphorothioate linkage
  modified_base 18: mod_base = OTHER; note = 2'-O-methoxyethyl modified nucleotide with phosphorothioate linkage
  modified_base 19: mod_base = OTHER; note = 2'-O-methoxyethyl 5-methylcytosine with phosphorothioate linkage
  modified_base 20: mod_base = OTHER; note = 2'-O-methoxyethyl modified nucleotide with phosphorothioate linkage
  modified_base 21: mod_base = OTHER; note = 2'-O-methoxyethyl 5-methylcytosine
  misc_feature 1: note = RNA
  misc_feature 2..6: note = DNA
  misc_feature 7: note = RNA
  misc_feature 8..12: note = DNA
  misc_feature 13..21: note = RNA
gaggtgaagcgaagtgcacac

SEQ ID NO: 917 - DNA, 21 bp, synthetic construct
  source 1..21: mol_type = other DNA
  modified_base 1: mod_base = OTHER; note = 2'-O-methoxyethyl modified nucleotide with phosphorothioate linkage
  modified_base 2: mod_base = OTHER; note = 2'-O-methoxyethyl modified nucleotide with phosphorothioate linkage
  modified_base 3: mod_base = OTHER; note = Nucleotide with phosphorothioate linkage
  modified_base 4: mod_base = OTHER; note = Nucleotide with phosphorothioate linkage
  modified_base 5: mod_base = OTHER; note = Nucleotide with phosphorothioate linkage
  modified_base 6: mod_base = OTHER; note = Thymine with phosphorothioate linkage
  modified_base 7: mod_base = OTHER; note = Nucleotide with phosphorothioate linkage
  modified_base 8: mod_base = OTHER; note = 2'-O-methoxyethyl modified nucleotide with phosphorothioate linkage
  modified_base 9: mod_base = OTHER; note = Nucleotide with phosphorothioate linkage
  modified_base 10: mod_base = OTHER; note = Nucleotide with phosphorothioate linkage
  modified_base 11: mod_base = OTHER; note = 5-methylcytosine with phosphorothioate linkage
  modified_base 12: mod_base = OTHER; note = Nucleotide with phosphorothioate linkage
  modified_base 13: mod_base = OTHER; note = Nucleotide with phosphorothioate linkage
  modified_base 14: mod_base = OTHER; note = 2'-O-methoxyethyl modified nucleotide with phosphorothioate linkage
  modified_base 15: mod_base = OTHER; note = 2'-O-methoxyethyl modified nucleotide with phosphorothioate linkage
  modified_base 16: mod_base = OTHER; note = 2'-O-methoxyethyl modified thymine with phosphorothioate linkage
  modified_base 17: mod_base = OTHER; note = 2'-O-methoxyethyl modified nucleotide with phosphorothioate linkage
  modified_base 18: mod_base = OTHER; note = 2'-O-methoxyethyl 5-methylcytosine with phosphorothioate linkage
  modified_base 19: mod_base = OTHER; note = 2'-O-methoxyethyl modified nucleotide with phosphorothioate linkage
  modified_base 20: mod_base = OTHER; note = 2'-O-methoxyethyl 5-methylcytosine with phosphorothioate linkage
  modified_base 21: mod_base = OTHER; note = 2'-O-methoxyethyl modified nucleotide
  misc_feature 1..2: note = RNA
  misc_feature 3..7: note = DNA
  misc_feature 8: note = RNA
  misc_feature 9..13: note = DNA
  misc_feature 14..21: note = RNA
agaggtgaagcgaagtgcaca

SEQ ID NO: 918 - DNA, 21 bp, synthetic construct
  source 1..21: mol_type = other DNA
  modified_base 1: mod_base = OTHER; note = 2'-O-methoxyethyl 5-methylcytosine with phosphorothioate linkage
  modified_base 2: mod_base = OTHER; note = 2'-O-methoxyethyl modified nucleotide with phosphorothioate linkage
  modified_base 3: mod_base = OTHER; note = 2'-O-methoxyethyl modified nucleotide with phosphorothioate linkage
  modified_base 4: mod_base = OTHER; note = Nucleotide with phosphorothioate linkage
  modified_base 5: mod_base = OTHER; note = Nucleotide with phosphorothioate linkage
  modified_base 6: mod_base = OTHER; note = Nucleotide with phosphorothioate linkage
  modified_base 7: mod_base = OTHER; note = Thymine with phosphorothioate linkage
  modified_base 8: mod_base = OTHER; note = Nucleotide with phosphorothioate linkage
  modified_base 9: mod_base = OTHER; note = 2'-O-methoxyethyl modified nucleotide with phosphorothioate linkage
  modified_base 10: mod_base = OTHER; note = Nucleotide with phosphorothioate linkage
  modified_base 11: mod_base = OTHER; note = Nucleotide with phosphorothioate linkage
  modified_base 12: mod_base = OTHER; note = 5-methylcytosine with phosphorothioate linkage
  modified_base 13: mod_base = OTHER; note = Nucleotide with phosphorothioate linkage
  modified_base 14: mod_base = OTHER; note = Nucleotide with phosphorothioate linkage
  modified_base 15: mod_base = OTHER; note = 2'-O-methoxyethyl modified nucleotide with phosphorothioate linkage
  modified_base 16: mod_base = OTHER; note = 2'-O-methoxyethyl modified nucleotide with phosphorothioate linkage
  modified_base 17: mod_base = OTHER; note = 2'-O-methoxyethyl modified thymine with phosphorothioate linkage
  modified_base 18: mod_base = OTHER; note = 2'-O-methoxyethyl modified nucleotide with phosphorothioate linkage
  modified_base 19: mod_base = OTHER; note = 2'-O-methoxyethyl 5-methylcytosine with phosphorothioate linkage
  modified_base 20: mod_base = OTHER; note = 2'-O-methoxyethyl modified nucleotide with phosphorothioate linkage
  modified_base 21: mod_base = OTHER; note = 2'-O-methoxyethyl 5-methylcytosine
  misc_feature 1..3: note = RNA
  misc_feature 4..8: note = DNA
  misc_feature 9: note = RNA
  misc_feature 10..14: note = DNA
  misc_feature 15..21: note = RNA
cagaggtgaagcgaagtgcac

SEQ ID NO: 919 - DNA, 21 bp, synthetic construct
  source 1..21: mol_type = other DNA
  modified_base 1: mod_base = OTHER; note = 2'-O-methoxyethyl modified nucleotide with phosphorothioate linkage
  modified_base 2: mod_base = OTHER; note = 2'-O-methoxyethyl 5-methylcytosine with phosphorothioate linkage
  modified_base 3: mod_base = OTHER; note = 2'-O-methoxyethyl modified nucleotide with phosphorothioate linkage
  modified_base 4: mod_base = OTHER; note = 2'-O-methoxyethyl modified nucleotide with phosphorothioate linkage
  modified_base 5: mod_base = OTHER; note = Nucleotide with phosphorothioate linkage
  modified_base 6: mod_base = OTHER; note = Nucleotide with phosphorothioate linkage
  modified_base 7: mod_base = OTHER; note = Nucleotide with phosphorothioate linkage
  modified_base 8: mod_base = OTHER; note = Thymine with phosphorothioate linkage
  modified_base 9: mod_base = OTHER; note = Nucleotide with phosphorothioate linkage
  modified_base 10: mod_base = OTHER; note = 2'-O-methoxyethyl modified nucleotide with phosphorothioate linkage
  modified_base 11: mod_base = OTHER; note = Nucleotide with phosphorothioate linkage
  modified_base 12: mod_base = OTHER; note = Nucleotide with phosphorothioate linkage
  modified_base 13: mod_base = OTHER; note = 5-methylcytosine with phosphorothioate linkage
  modified_base 14: mod_base = OTHER; note = Nucleotide with phosphorothioate linkage
  modified_base 15: mod_base = OTHER; note = Nucleotide with phosphorothioate linkage
  modified_base 16: mod_base = OTHER; note = 2'-O-methoxyethyl modified nucleotide with phosphorothioate linkage
  modified_base 17: mod_base = OTHER; note = 2'-O-methoxyethyl modified nucleotide with phosphorothioate linkage
  modified_base 18: mod_base = OTHER; note = 2'-O-methoxyethyl modified thymine with phosphorothioate linkage
  modified_base 19: mod_base = OTHER; note = 2'-O-methoxyethyl modified nucleotide with phosphorothioate linkage
  modified_base 20: mod_base = OTHER; note = 2'-O-methoxyethyl 5-methylcytosine with phosphorothioate linkage
  modified_base 21: mod_base = OTHER; note = 2'-O-methoxyethyl modified nucleotide
  misc_feature 1..4: note = RNA
  misc_feature 5..9: note = DNA
  misc_feature 10: note = RNA
  misc_feature 11..15: note = DNA
  misc_feature 16..21: note = RNA
gcagaggtgaagcgaagtgca

SEQ ID NO: 920 - DNA, 21 bp, synthetic construct
  source 1..21: mol_type = other DNA
  modified_base 1: mod_base = OTHER; note = 2'-O-methoxyethyl modified thymine with phosphorothioate linkage
  modified_base 2: mod_base = OTHER; note = 2'-O-methoxyethyl modified nucleotide with phosphorothioate linkage
  modified_base 3: mod_base = OTHER; note = 2'-O-methoxyethyl 5-methylcytosine with phosphorothioate linkage
  modified_base 4: mod_base = OTHER; note = 2'-O-methoxyethyl modified nucleotide with phosphorothioate linkage
  modified_base 5: mod_base = OTHER; note = 2'-O-methoxyethyl modified nucleotide with phosphorothioate linkage
  modified_base 6: mod_base = OTHER; note = Nucleotide with phosphorothioate linkage
  modified_base 7: mod_base = OTHER; note = Nucleotide with phosphorothioate linkage
  modified_base 8: mod_base = OTHER; note = Nucleotide with phosphorothioate linkage
  modified_base 9: mod_base = OTHER; note = Thymine with phosphorothioate linkage
  modified_base 10: mod_base = OTHER; note = Nucleotide with phosphorothioate linkage
  modified_base 11: mod_base = OTHER; note = 2'-O-methoxyethyl modified nucleotide with phosphorothioate linkage
  modified_base 12: mod_base = OTHER; note = Nucleotide with phosphorothioate linkage
  modified_base 13: mod_base = OTHER; note = Nucleotide with phosphorothioate linkage
  modified_base 14: mod_base = OTHER; note = 5-methylcytosine with phosphorothioate linkage
  modified_base 15: mod_base = OTHER; note = Nucleotide with phosphorothioate linkage
  modified_base 16: mod_base = OTHER; note = Nucleotide with phosphorothioate linkage
  modified_base 17: mod_base = OTHER; note = 2'-O-methoxyethyl modified nucleotide with phosphorothioate linkage
  modified_base 18: mod_base = OTHER; note = 2'-O-methoxyethyl modified nucleotide with phosphorothioate linkage
  modified_base 19: mod_base = OTHER; note = 2'-O-methoxyethyl modified thymine with phosphorothioate linkage
  modified_base 20: mod_base = OTHER; note = 2'-O-methoxyethyl modified nucleotide with phosphorothioate linkage
  modified_base 21: mod_base = OTHER; note = 2'-O-methoxyethyl 5-methylcytosine
  misc_feature 1..5: note = RNA
  misc_feature 6..10: note = DNA
  misc_feature 11: note = RNA
  misc_feature 12..16: note = DNA
  misc_feature 17..21: note = RNA
tgcagaggtgaagcgaagtgc

SEQ ID NO: 921 - DNA, 21 bp, synthetic construct
  source 1..21: mol_type = other DNA
  modified_base 1: mod_base = OTHER; note = 2'-O-methoxyethyl modified nucleotide with phosphorothioate linkage
  modified_base 2: mod_base = OTHER; note = 2'-O-methoxyethyl modified thymine with phosphorothioate linkage
  modified_base 3: mod_base = OTHER; note = 2'-O-methoxyethyl modified nucleotide with phosphorothioate linkage
  modified_base 4: mod_base = OTHER; note = 2'-O-methoxyethyl 5-methylcytosine with phosphorothioate linkage
  modified_base 5: mod_base = OTHER; note = 2'-O-methoxyethyl modified nucleotide with phosphorothioate linkage
  modified_base 6: mod_base = OTHER; note = 2'-O-methoxyethyl modified nucleotide with phosphorothioate linkage
  modified_base 7: mod_base = OTHER; note = Nucleotide with phosphorothioate linkage
  modified_base 8: mod_base = OTHER; note = Nucleotide with phosphorothioate linkage
  modified_base 9: mod_base = OTHER; note = Nucleotide with phosphorothioate linkage
  modified_base 10: mod_base = OTHER; note = Thymine with phosphorothioate linkage
  modified_base 11: mod_base = OTHER; note = Nucleotide with phosphorothioate linkage
  modified_base 12: mod_base = OTHER; note = 2'-O-methoxyethyl modified nucleotide with phosphorothioate linkage
  modified_base 13: mod_base = OTHER; note = Nucleotide with phosphorothioate linkage
  modified_base 14: mod_base = OTHER; note = Nucleotide with phosphorothioate linkage
  modified_base 15: mod_base = OTHER; note = 5-methylcytosine with phosphorothioate linkage
  modified_base 16: mod_base = OTHER; note = Nucleotide with phosphorothioate linkage
  modified_base 17: mod_base = OTHER; note = Nucleotide with phosphorothioate linkage
  modified_base 18: mod_base = OTHER; note = 2'-O-methoxyethyl modified nucleotide with phosphorothioate linkage
  modified_base 19: mod_base = OTHER; note = 2'-O-methoxyethyl modified nucleotide with phosphorothioate linkage
  modified_base 20: mod_base = OTHER; note = 2'-O-methoxyethyl modified thymine with phosphorothioate linkage
  modified_base 21: mod_base = OTHER; note = 2'-O-methoxyethyl modified nucleotide
  misc_feature 1..6: note = RNA
  misc_feature 7..11: note = DNA
  misc_feature 12: note = RNA
  misc_feature 13..17: note = DNA
  misc_feature 18..21: note = RNA
gtgcagaggtgaagcgaagtg

SEQ ID NO: 922 - DNA, 21 bp, synthetic construct
  source 1..21: mol_type = other DNA
  modified_base 1: mod_base = OTHER; note = 2'-O-methoxyethyl 5-methylcytosine with phosphorothioate linkage
  modified_base 2: mod_base = OTHER; note = 2'-O-methoxyethyl modified nucleotide with phosphorothioate linkage
  modified_base 3: mod_base = OTHER; note = 2'-O-methoxyethyl modified thymine with phosphorothioate linkage
  modified_base 4: mod_base = OTHER; note = 2'-O-methoxyethyl modified nucleotide with phosphorothioate linkage
  modified_base 5: mod_base = OTHER; note = 2'-O-methoxyethyl 5-methylcytosine with phosphorothioate linkage
  modified_base 6: mod_base = OTHER; note = 2'-O-methoxyethyl modified nucleotide with phosphorothioate linkage
  modified_base 7: mod_base = OTHER; note = 2'-O-methoxyethyl modified nucleotide with phosphorothioate linkage
  modified_base 8: mod_base = OTHER; note = Nucleotide with phosphorothioate linkage
  modified_base 9: mod_base = OTHER; note = Nucleotide with phosphorothioate linkage
  modified_base 10: mod_base = OTHER; note = Nucleotide with phosphorothioate linkage
  modified_base 11: mod_base = OTHER; note = Thymine with phosphorothioate linkage
  modified_base 12: mod_base = OTHER; note = Nucleotide with phosphorothioate linkage
  modified_base 13: mod_base = OTHER; note = 2'-O-methoxyethyl modified nucleotide with phosphorothioate linkage
  modified_base 14: mod_base = OTHER; note = Nucleotide with phosphorothioate linkage
  modified_base 15: mod_base = OTHER; note = Nucleotide with phosphorothioate linkage
  modified_base 16: mod_base = OTHER; note = 5-methylcytosine with phosphorothioate linkage
  modified_base 17: mod_base = OTHER; note = Nucleotide with phosphorothioate linkage
  modified_base 18: mod_base = OTHER; note = Nucleotide with phosphorothioate linkage
  modified_base 19: mod_base = OTHER; note = 2'-O-methoxyethyl modified nucleotide with phosphorothioate linkage
  modified_base 20: mod_base = OTHER; note = 2'-O-methoxyethyl modified nucleotide with phosphorothioate linkage
  modified_base 21: mod_base = OTHER; note = 2'-O-methoxyethyl thymine
  misc_feature 1..7: note = RNA
  misc_feature 8..12: note = DNA
  misc_feature 13: note = RNA
  misc_feature 14..18: note = DNA
  misc_feature 19..21: note = RNA
cgtgcagaggtgaagcgaagt

SEQ ID NO: 923 - DNA, 21 bp, synthetic construct
  source 1..21: mol_type = other DNA
  modified_base 1: mod_base = OTHER; note = 2'-O-methoxyethyl modified nucleotide with phosphorothioate linkage
  modified_base 2: mod_base = OTHER; note = 2'-O-methoxyethyl 5-methylcytosine with phosphorothioate linkage
  modified_base 3: mod_base = OTHER; note = 2'-O-methoxyethyl modified nucleotide with phosphorothioate linkage
  modified_base 4: mod_base = OTHER; note = 2'-O-methoxyethyl modified thymine with phosphorothioate linkage
  modified_base 5: mod_base = OTHER; note = 2'-O-methoxyethyl modified nucleotide with phosphorothioate linkage
  modified_base 6: mod_base = OTHER; note = 2'-O-methoxyethyl 5-methylcytosine with phosphorothioate linkage
  modified_base 7: mod_base = OTHER; note = 2'-O-methoxyethyl modified nucleotide with phosphorothioate linkage
  modified_base 8: mod_base = OTHER; note = 2'-O-methoxyethyl modified nucleotide with phosphorothioate linkage
  modified_base 9: mod_base = OTHER; note = Nucleotide with phosphorothioate linkage
  modified_base 10: mod_base = OTHER; note = Nucleotide with phosphorothioate linkage
  modified_base 11: mod_base = OTHER; note = Nucleotide with phosphorothioate linkage
  modified_base 12: mod_base = OTHER; note = Thymine with phosphorothioate linkage
  modified_base 13: mod_base = OTHER; note = Nucleotide with phosphorothioate linkage
  modified_base 14: mod_base = OTHER; note = 2'-O-methoxyethyl modified nucleotide with phosphorothioate linkage
  modified_base 15: mod_base = OTHER; note = Nucleotide with phosphorothioate linkage
  modified_base 16: mod_base = OTHER; note = Nucleotide with phosphorothioate linkage
  modified_base 17: mod_base = OTHER; note = 5-methylcytosine with phosphorothioate linkage
  modified_base 18: mod_base = OTHER; note = Nucleotide with phosphorothioate linkage
  modified_base 19: mod_base = OTHER; note = Nucleotide with phosphorothioate linkage
  modified_base 20: mod_base = OTHER; note = 2'-O-methoxyethyl modified nucleotide with phosphorothioate linkage
  modified_base 21: mod_base = OTHER; note = 2'-O-methoxyethyl modified nucleotide
  misc_feature 1..8: note = RNA
  misc_feature 9..13: note = DNA
  misc_feature 14: note = RNA
  misc_feature 15..19: note = DNA
  misc_feature 20..21: note = RNA
acgtgcagaggtgaagcgaag

SEQ ID NO: 924 - DNA, 21 bp, synthetic construct
  source 1..21: mol_type = other DNA
  modified_base 1: mod_base = OTHER; note = Nucleotide with phosphorothioate linkage
  modified_base 2: mod_base = OTHER; note = Nucleotide with phosphorothioate linkage
  modified_base 3: mod_base = OTHER; note = Nucleotide with phosphorothioate linkage
  modified_base 4: mod_base = OTHER; note = Thymine with phosphorothioate linkage
  modified_base 5: mod_base = OTHER; note = Nucleotide with phosphorothioate linkage
  modified_base 6: mod_base = OTHER; note = Nucleotide with phosphorothioate linkage
  modified_base 7: mod_base = OTHER; note = Nucleotide with phosphorothioate linkage
  modified_base 8: mod_base = OTHER; note = Nucleotide with phosphorothioate linkage
  modified_base 9: mod_base = OTHER; note = 5-methylcytosine with phosphorothioate linkage
  modified_base 10: mod_base = OTHER; note = Nucleotide with phosphorothioate linkage
  modified_base 11: mod_base = OTHER; note = Nucleotide with phosphorothioate linkage
  modified_base 12: mod_base = OTHER; note = 2'-O-methoxyethyl modified nucleotide with phosphorothioate linkage
  modified_base 13: mod_base = OTHER; note = 2'-O-methoxyethyl modified nucleotide with phosphorothioate linkage
  modified_base 14: mod_base = OTHER; note = 2'-O-methoxyethyl modified thymine with phosphorothioate linkage
  modified_base 15: mod_base = OTHER; note = 2'-O-methoxyethyl modified nucleotide with phosphorothioate linkage
  modified_base 16: mod_base = OTHER; note = 2'-O-methoxyethyl 5-methylcytosine with phosphorothioate linkage
  modified_base 17: mod_base = OTHER; note = 2'-O-methoxyethyl modified nucleotide with phosphorothioate linkage
  modified_base 18: mod_base = OTHER; note = 2'-O-methoxyethyl 5-methylcytosine with phosphorothioate linkage
  modified_base 19: mod_base = OTHER; note = 2'-O-methoxyethyl modified nucleotide with phosphorothioate linkage
  modified_base 20: mod_base = OTHER; note = 2'-O-methoxyethyl 5-methylcytosine with phosphorothioate linkage
  modified_base 21: mod_base = OTHER; note = 2'-O-methoxyethyl modified nucleotide
  misc_feature 1..11: note = DNA
  misc_feature 12..21: note = RNA
aggtgaagcgaagtgcacacg

SEQ ID NO: 925 - DNA, 21 bp, synthetic construct
  source 1..21: mol_type = other DNA
  modified_base 1: mod_base = OTHER; note = 2'-O-methoxyethyl modified nucleotide with phosphorothioate linkage
  modified_base 2: mod_base = OTHER; note = Nucleotide with phosphorothioate linkage
  modified_base 3: mod_base = OTHER; note = Nucleotide with phosphorothioate linkage
  modified_base 4: mod_base = OTHER; note = Nucleotide with phosphorothioate linkage
  modified_base 5: mod_base = OTHER; note = Thymine with phosphorothioate linkage
  modified_base 6: mod_base = OTHER; note = Nucleotide with phosphorothioate linkage
  modified_base 7: mod_base = OTHER; note = Nucleotide with phosphorothioate linkage
  modified_base 8: mod_base = OTHER; note = Nucleotide with phosphorothioate linkage
  modified_base 9: mod_base = OTHER; note = Nucleotide with phosphorothioate linkage
  modified_base 10: mod_base = OTHER; note = 5-methylcytosine with phosphorothioate linkage
  modified_base 11: mod_base = OTHER; note = Nucleotide with phosphorothioate linkage
  modified_base 12: mod_base = OTHER; note = Nucleotide with phosphorothioate linkage
  modified_base 13: mod_base = OTHER; note = 2'-O-methoxyethyl modified nucleotide with phosphorothioate linkage
  modified_base 14: mod_base = OTHER; note = 2'-O-methoxyethyl modified nucleotide with phosphorothioate linkage
  modified_base 15: mod_base = OTHER; note = 2'-O-methoxyethyl modified thymine with phosphorothioate linkage
  modified_base 16: mod_base = OTHER; note = 2'-O-methoxyethyl modified nucleotide with phosphorothioate linkage
  modified_base 17: mod_base = OTHER; note = 2'-O-methoxyethyl 5-methylcytosine with phosphorothioate linkage
  modified_base 18: mod_base = OTHER; note = 2'-O-methoxyethyl modified nucleotide with phosphorothioate linkage
  modified_base 19: mod_base = OTHER; note = 2'-O-methoxyethyl 5-methylcytosine with phosphorothioate linkage
  modified_base 20: mod_base = OTHER; note = 2'-O-methoxyethyl modified nucleotide with phosphorothioate linkage
  modified_base 21: mod_base = OTHER; note = 2'-O-methoxyethyl 5-methylcytosine
  misc_feature 1: note = RNA
  misc_feature 2..12: note = DNA
  misc_feature 13..21: note = RNA
gaggtgaagcgaagtgcacac

SEQ ID NO: 926 - DNA, 21 bp, synthetic construct
  source 1..21: mol_type = other DNA
  modified_base 1: mod_base = OTHER; note = 2'-O-methoxyethyl modified nucleotide with phosphorothioate linkage
  modified_base 2: mod_base = OTHER; note = 2'-O-methoxyethyl modified nucleotide with phosphorothioate linkage
  modified_base 3: mod_base = OTHER; note = Nucleotide with phosphorothioate linkage
  modified_base 4: mod_base = OTHER; note = Nucleotide with phosphorothioate linkage
  modified_base 5: mod_base = OTHER; note = Nucleotide with phosphorothioate linkage
  modified_base 6: mod_base = OTHER; note = Thymine with phosphorothioate linkage
  modified_base 7: mod_base = OTHER; note = Nucleotide with phosphorothioate linkage
  modified_base 8: mod_base = OTHER; note = Nucleotide with phosphorothioate linkage
  modified_base 9: mod_base = OTHER; note = Nucleotide with phosphorothioate linkage
  modified_base 10: mod_base = OTHER; note = Nucleotide with phosphorothioate linkage
  modified_base 11: mod_base = OTHER; note = 5-methylcytosine with phosphorothioate linkage
  modified_base 12: mod_base = OTHER; note = Nucleotide with phosphorothioate linkage
  modified_base 13: mod_base = OTHER; note = Nucleotide with phosphorothioate linkage
  modified_base 14: mod_base = OTHER; note = 2'-O-methoxyethyl modified nucleotide with phosphorothioate linkage
  modified_base 15: mod_base = OTHER; note = 2'-O-methoxyethyl modified nucleotide with phosphorothioate linkage
  modified_base 16: mod_base = OTHER; note = 2'-O-methoxyethyl modified thymine with phosphorothioate linkage
  modified_base 17: mod_base = OTHER; note = 2'-O-methoxyethyl modified nucleotide with phosphorothioate linkage
  modified_base 18: mod_base = OTHER; note = 2'-O-methoxyethyl 5-methylcytosine with phosphorothioate linkage
  modified_base 19: mod_base = OTHER; note = 2'-O-methoxyethyl modified nucleotide with phosphorothioate linkage
  modified_base 20: mod_base = OTHER; note = 2'-O-methoxyethyl 5-methylcytosine with phosphorothioate linkage
  modified_base 21: mod_base = OTHER; note = 2'-O-methoxyethyl modified nucleotide
  misc_feature 1..2: note = RNA
  misc_feature 3..13: note = DNA
  misc_feature 14..21: note = RNA
agaggtgaagcgaagtgcaca

SEQ ID NO: 927 - DNA, 21 bp, synthetic construct
  source 1..21: mol_type = other DNA
  modified_base 1: mod_base = OTHER; note = 2'-O-methoxyethyl 5-methylcytosine with phosphorothioate linkage
  modified_base 2: mod_base = OTHER; note = 2'-O-methoxyethyl modified nucleotide with phosphorothioate linkage
  modified_base 3: mod_base = OTHER; note = 2'-O-methoxyethyl modified nucleotide with phosphorothioate linkage
  modified_base 4: mod_base = OTHER; note = Nucleotide with phosphorothioate linkage
  modified_base 5: mod_base = OTHER; note = Nucleotide with phosphorothioate linkage
  modified_base 6: mod_base = OTHER; note = Nucleotide with phosphorothioate linkage
  modified_base 7: mod_base = OTHER; note = Thymine with phosphorothioate linkage
  modified_base 8: mod_base = OTHER; note = Nucleotide with phosphorothioate linkage
  modified_base 9: mod_base = OTHER; note = Nucleotide with phosphorothioate linkage
  modified_base 10: mod_base = OTHER; note = Nucleotide with phosphorothioate linkage
  modified_base 11: mod_base = OTHER; note = Nucleotide with phosphorothioate linkage
  modified_base 12: mod_base = OTHER; note = 5-methylcytosine with phosphorothioate linkage
  modified_base 13: mod_base = OTHER; note = Nucleotide with phosphorothioate linkage
  modified_base 14: mod_base = OTHER; note = Nucleotide with phosphorothioate linkage
  modified_base 15: mod_base = OTHER; note = 2'-O-methoxyethyl modified nucleotide with phosphorothioate linkage
  modified_base 16: mod_base = OTHER; note = 2'-O-methoxyethyl modified nucleotide with phosphorothioate linkage
  modified_base 17: mod_base = OTHER; note = 2'-O-methoxyethyl modified thymine with phosphorothioate linkage
  modified_base 18: mod_base = OTHER; note = 2'-O-methoxyethyl modified nucleotide with phosphorothioate linkage
  modified_base 19: mod_base = OTHER; note = 2'-O-methoxyethyl 5-methylcytosine with phosphorothioate linkage
  modified_base 20: mod_base = OTHER; note = 2'-O-methoxyethyl modified nucleotide with phosphorothioate linkage
  modified_base 21: mod_base = OTHER; note = 2'-O-methoxyethyl 5-methylcytosine
  misc_feature 1..3: note = RNA
  misc_feature 4..14: note = DNA
  misc_feature 15..21: note = RNA
cagaggtgaagcgaagtgcac

SEQ ID NO: 928 - DNA, 21 bp, synthetic construct
  source 1..21: mol_type = other DNA
  modified_base 1: mod_base = OTHER; note = 2'-O-methoxyethyl modified nucleotide with phosphorothioate linkage
  modified_base 2: mod_base = OTHER; note = 2'-O-methoxyethyl 5-methylcytosine with phosphorothioate linkage
  modified_base 3: mod_base = OTHER; note = 2'-O-methoxyethyl modified nucleotide with phosphorothioate linkage
  modified_base 4: mod_base = OTHER; note = 2'-O-methoxyethyl modified nucleotide with phosphorothioate linkage
  modified_base 5: mod_base = OTHER; note = Nucleotide with phosphorothioate linkage
  modified_base 6: mod_base = OTHER; note = Nucleotide with phosphorothioate linkage
  modified_base 7: mod_base = OTHER; note = Nucleotide with phosphorothioate linkage
  modified_base 8: mod_base = OTHER; note = Thymine with phosphorothioate linkage
  modified_base 9: mod_base = OTHER; note = Nucleotide with phosphorothioate linkage
  modified_base 10: mod_base = OTHER; note = Nucleotide with phosphorothioate linkage
  modified_base 11: mod_base = OTHER; note = Nucleotide with phosphorothioate linkage
  modified_base 12: mod_base = OTHER; note = Nucleotide with phosphorothioate linkage
  modified_base 13: mod_base = OTHER; note = 5-methylcytosine with phosphorothioate linkage
  modified_base 14: mod_base = OTHER; note = Nucleotide with phosphorothioate linkage
  modified_base 15: mod_base = OTHER; note = Nucleotide with phosphorothioate linkage
  modified_base 16: mod_base = OTHER; note = 2'-O-methoxyethyl modified nucleotide with phosphorothioate linkage
  modified_base 17: mod_base = OTHER; note = 2'-O-methoxyethyl modified nucleotide with phosphorothioate linkage
  modified_base 18: mod_base = OTHER; note = 2'-O-methoxyethyl modified thymine with phosphorothioate linkage
  modified_base 19: mod_base = OTHER; note = 2'-O-methoxyethyl modified nucleotide with phosphorothioate linkage
  modified_base 20: mod_base = OTHER; note = 2'-O-methoxyethyl 5-methylcytosine with phosphorothioate linkage
  modified_base 21: mod_base = OTHER; note = 2'-O-methoxyethyl modified nucleotide
  misc_feature 1..4: note = RNA
  misc_feature 5..15: note = DNA
  misc_feature 16..21: note = RNA
gcagaggtgaagcgaagtgca

SEQ ID NO: 929 - DNA, 21 bp, synthetic construct
  source 1..21: mol_type = other DNA
  modified_base 1: mod_base = OTHER; note = 2'-O-methoxyethyl modified thymine with phosphorothioate linkage
  modified_base 2: mod_base = OTHER; note = 2'-O-methoxyethyl modified nucleotide with phosphorothioate linkage
  modified_base 3: mod_base = OTHER; note = 2'-O-methoxyethyl 5-methylcytosine with phosphorothioate linkage
  modified_base 4: mod_base = OTHER; note = 2'-O-methoxyethyl modified nucleotide with phosphorothioate linkage
  modified_base 5: mod_base = OTHER; note = 2'-O-methoxyethyl modified nucleotide with phosphorothioate linkage
  modified_base 6: mod_base = OTHER; note = Nucleotide with phosphorothioate linkage
  modified_base 7: mod_base = OTHER; note = Nucleotide with phosphorothioate linkage
  modified_base 8: mod_base = OTHER; note = Nucleotide with phosphorothioate linkage
  modified_base 9: mod_base = OTHER; note = Thymine with phosphorothioate linkage
  modified_base 10: mod_base = OTHER; note = Nucleotide with phosphorothioate linkage
  modified_base 11: mod_base = OTHER; note = Nucleotide with phosphorothioate linkage
  modified_base 12: mod_base = OTHER; note = Nucleotide with phosphorothioate linkage
  modified_base 13: mod_base = OTHER; note = Nucleotide with phosphorothioate linkage
  modified_base 14: mod_base = OTHER; note = 5-methylcytosine with phosphorothioate linkage
  modified_base 15: mod_base = OTHER; note = Nucleotide with phosphorothioate linkage
  modified_base 16: mod_base = OTHER; note = Nucleotide with phosphorothioate linkage
  modified_base 17: mod_base = OTHER; note = 2'-O-methoxyethyl modified nucleotide with phosphorothioate linkage
  modified_base 18: mod_base = OTHER; note = 2'-O-methoxyethyl modified nucleotide with phosphorothioate linkage
  modified_base 19: mod_base = OTHER; note = 2'-O-methoxyethyl modified thymine with phosphorothioate linkage
  modified_base 20: mod_base = OTHER; note = 2'-O-methoxyethyl modified nucleotide with phosphorothioate linkage
  modified_base 21: mod_base = OTHER; note = 2'-O-methoxyethyl 5-methylcytosine
  misc_feature 1..5: note = RNA
  misc_feature 6..16: note = DNA
  misc_feature 17..21: note = RNA
tgcagaggtgaagcgaagtgc

SEQ ID NO: 930 - DNA, 21 bp, synthetic construct
  source 1..21: mol_type = other DNA
  modified_base 1: mod_base = OTHER; note = 2'-O-methoxyethyl modified nucleotide with phosphorothioate linkage
  modified_base 2: mod_base = OTHER; note = 2'-O-methoxyethyl modified thymine with phosphorothioate linkage
  modified_base 3: mod_base = OTHER; note = 2'-O-methoxyethyl modified nucleotide with phosphorothioate linkage
  modified_base 4: mod_base = OTHER; note = 2'-O-methoxyethyl 5-methylcytosine with phosphorothioate linkage
  modified_base 5: mod_base = OTHER; note = 2'-O-methoxyethyl modified nucleotide with phosphorothioate linkage
  modified_base 6: mod_base = OTHER; note = 2'-O-methoxyethyl modified nucleotide with phosphorothioate linkage
  modified_base 7: mod_base = OTHER; note = Nucleotide with phosphorothioate linkage
  modified_base 8: mod_base = OTHER; note = Nucleotide with phosphorothioate linkage
  modified_base 9: mod_base = OTHER; note = Nucleotide with phosphorothioate linkage
  modified_base 10: mod_base = OTHER; note = Thymine with phosphorothioate linkage
  modified_base 11: mod_base = OTHER; note = Nucleotide with phosphorothioate linkage
  modified_base 12: mod_base = OTHER; note = Nucleotide with phosphorothioate linkage
  modified_base 13: mod_base = OTHER; note = Nucleotide with phosphorothioate linkage
  modified_base 14: mod_base = OTHER; note = Nucleotide with phosphorothioate linkage
  modified_base 15: mod_base = OTHER; note = 5-methylcytosine with phosphorothioate linkage
  modified_base 16: mod_base = OTHER; note = Nucleotide with phosphorothioate linkage
  modified_base 17: mod_base = OTHER; note = Nucleotide with phosphorothioate linkage
  modified_base 18: mod_base = OTHER; note = 2'-O-methoxyethyl modified nucleotide with phosphorothioate linkage
  modified_base 19: mod_base = OTHER; note = 2'-O-methoxyethyl modified nucleotide with phosphorothioate linkage
  modified_base 20: mod_base = OTHER; note = 2'-O-methoxyethyl modified thymine with phosphorothioate linkage
  modified_base 21: mod_base = OTHER; note = 2'-O-methoxyethyl modified nucleotide
  misc_feature 1..6: note = RNA
  misc_feature 7..17: note = DNA
  misc_feature 18..21: note = RNA
gtgcagaggtgaagcgaagtg

SEQ ID NO: 931 - DNA, 21 bp, synthetic construct
  source 1..21: mol_type = other DNA
  modified_base 1: mod_base = OTHER; note = 2'-O-methoxyethyl 5-methylcytosine with phosphorothioate linkage
  modified_base 2: mod_base = OTHER; note = 2'-O-methoxyethyl modified nucleotide with phosphorothioate linkage
  modified_base 3: mod_base = OTHER; note = 2'-O-methoxyethyl modified thymine with phosphorothioate linkage
  modified_base 4: mod_base = OTHER; note = 2'-O-methoxyethyl modified nucleotide with phosphorothioate linkage
  modified_base 5: mod_base = OTHER; note = 2'-O-methoxyethyl 5-methylcytosine with phosphorothioate linkage
  modified_base 6: mod_base = OTHER; note = 2'-O-methoxyethyl modified nucleotide with phosphorothioate linkage
  modified_base 7: mod_base = OTHER; note = 2'-O-methoxyethyl modified nucleotide with phosphorothioate linkage
  modified_base 8: mod_base = OTHER; note = Nucleotide with phosphorothioate linkage
  modified_base 9: mod_base = OTHER; note = Nucleotide with phosphorothioate linkage
  modified_base 10: mod_base = OTHER; note = Nucleotide with phosphorothioate linkage
  modified_base 11: mod_base = OTHER; note = Thymine with phosphorothioate linkage
  modified_base 12: mod_base = OTHER; note = Nucleotide with phosphorothioate linkage
  modified_base 13: mod_base = OTHER; note = Nucleotide with phosphorothioate linkage
  modified_base 14: mod_base = OTHER; note = Nucleotide with phosphorothioate linkage
  modified_base 15: mod_base = OTHER; note = Nucleotide with phosphorothioate linkage
  modified_base 16: mod_base = OTHER; note = 5-methylcytosine with phosphorothioate linkage
  modified_base 17: mod_base = OTHER; note = Nucleotide with phosphorothioate linkage
  modified_base 18: mod_base = OTHER; note = Nucleotide with phosphorothioate linkage
  modified_base 19: mod_base = OTHER; note = 2'-O-methoxyethyl modified nucleotide with phosphorothioate linkage
  modified_base 20: mod_base = OTHER; note = 2'-O-methoxyethyl modified nucleotide with phosphorothioate linkage
  modified_base 21: mod_base = OTHER; note = 2'-O-methoxyethyl thymine
  misc_feature 1..7: note = RNA
  misc_feature 8..18: note = DNA
  misc_feature 19..21: note = RNA
cgtgcagaggtgaagcgaagt

SEQ ID NO: 932 - DNA, 21 bp, synthetic construct
  source 1..21: mol_type = other DNA
  modified_base 1: mod_base = OTHER; note = 2'-O-methoxyethyl modified nucleotide with phosphorothioate linkage
  modified_base 2: mod_base = OTHER; note = 2'-O-methoxyethyl 5-methylcytosine with phosphorothioate linkage
  modified_base 3: mod_base = OTHER; note = 2'-O-methoxyethyl modified nucleotide with phosphorothioate linkage
  modified_base 4: mod_base = OTHER; note = 2'-O-methoxyethyl modified thymine with phosphorothioate linkage
  modified_base 5: mod_base = OTHER; note = 2'-O-methoxyethyl modified nucleotide with phosphorothioate linkage
  modified_base 6: mod_base = OTHER; note = 2'-O-methoxyethyl 5-methylcytosine with phosphorothioate linkage
  modified_base 7: mod_base = OTHER; note = 2'-O-methoxyethyl modified nucleotide with phosphorothioate linkage
  modified_base 8: mod_base = OTHER; note = 2'-O-methoxyethyl modified nucleotide with phosphorothioate linkage
  modified_base 9: mod_base = OTHER; note = Nucleotide with phosphorothioate linkage
  modified_base 10: mod_base = OTHER; note = Nucleotide with phosphorothioate linkage
  modified_base 11: mod_base = OTHER; note = Nucleotide with phosphorothioate linkage
  modified_base 12: mod_base = OTHER; note = Thymine with phosphorothioate linkage
  modified_base 13: mod_base = OTHER; note = Nucleotide with phosphorothioate linkage
  modified_base 14: mod_base = OTHER; note = Nucleotide with phosphorothioate linkage
  modified_base 15: mod_base = OTHER; note = Nucleotide with phosphorothioate linkage
  modified_base 16: mod_base = OTHER; note = Nucleotide with phosphorothioate linkage
  modified_base 17: mod_base = OTHER; note = 5-methylcytosine with phosphorothioate linkage
  modified_base 18: mod_base = OTHER; note = Nucleotide with phosphorothioate linkage
  modified_base 19: mod_base = OTHER; note = Nucleotide with phosphorothioate linkage
  modified_base 20: mod_base = OTHER; note = 2'-O-methoxyethyl modified nucleotide with phosphorothioate linkage
  modified_base 21: mod_base = OTHER; note = 2'-O-methoxyethyl modified nucleotide
  misc_feature 1..8: note = RNA
  misc_feature 9..19: note = DNA
  misc_feature 20..21: note = RNA
acgtgcagaggtgaagcgaag

SEQ ID NO: 933 - DNA, 20 bp, synthetic construct
  source 1..20: mol_type = other DNA
  modified_base 1: mod_base = OTHER; note = Locked abasic nucleotide with phosphorothioate linkage
  modified_base 2: mod_base = OTHER; note = 2'-O-methoxyethyl 5-methylcytosine with phosphorothioate linkage
  modified_base 3: mod_base = OTHER; note = 2'-O-methoxyethyl modified nucleotide with phosphorothioate linkage
  modified_base 4: mod_base = OTHER; note = 2'-O-methoxyethyl modified nucleotide with phosphorothioate linkage
  modified_base 5: mod_base = OTHER; note = 2'-O-methoxyethyl modified nucleotide with phosphorothioate linkage
  modified_base 6: mod_base = OTHER; note = Nucleotide with phosphorothioate linkage
  modified_base 7: mod_base = OTHER; note = Nucleotide with phosphorothioate linkage
  modified_base 8: mod_base = OTHER; note = Thymine with phosphorothioate linkage
  modified_base 9: mod_base = OTHER; note = Nucleotide with phosphorothioate linkage
  modified_base 10: mod_base = OTHER; note = Nucleotide with phosphorothioate linkage
  modified_base 11: mod_base = OTHER; note = Nucleotide with phosphorothioate linkage
  modified_base 12: mod_base = OTHER; note = Nucleotide with phosphorothioate linkage
  modified_base 13: mod_base = OTHER; note = 5-methylcytosine with phosphorothioate linkage
  modified_base 14: mod_base = OTHER; note = Nucleotide with phosphorothioate linkage
  modified_base 15: mod_base = OTHER; note = Nucleotide with phosphorothioate linkage
  modified_base 16: mod_base = OTHER; note = 2'-O-methoxyethyl modified nucleotide with phosphorothioate linkage
  modified_base 17: mod_base = OTHER; note = 2'-O-methoxyethyl modified nucleotide with phosphorothioate linkage
  modified_base 18: mod_base = OTHER; note = 2'-O-methoxyethyl modified thymine with phosphorothioate linkage
  modified_base 19: mod_base = OTHER; note = 2'-O-methoxyethyl modified nucleotide with phosphorothioate linkage
  modified_base 20: mod_base = OTHER; note = 2'-O-methoxyethyl 5-methylcytosine
  misc_feature 1..5: note = RNA
  misc_feature 6..15: note = DNA
  misc_feature 16..20: note = RNA
ncagaggtgaagcgaagtgc

SEQ ID NO: 934 - DNA, 20 bp, synthetic construct
  source 1..20: mol_type = other DNA
  modified_base 1: mod_base = OTHER; note = 2'-O-methoxyethyl modified nucleotide with phosphorothioate linkage
  modified_base 2: mod_base = OTHER; note = Locked abasic nucleotide with phosphorothioate linkage
  modified_base 3: mod_base = OTHER; note = 2'-O-methoxyethyl modified nucleotide with phosphorothioate linkage
  modified_base 4: mod_base = OTHER; note = 2'-O-methoxyethyl modified nucleotide with phosphorothioate linkage
  modified_base 5: mod_base = OTHER; note = 2'-O-methoxyethyl modified nucleotide with phosphorothioate linkage
  modified_base 6: mod_base = OTHER; note = Nucleotide with phosphorothioate linkage
  modified_base 7: mod_base = OTHER; note = Nucleotide with phosphorothioate linkage
  modified_base 8: mod_base = OTHER; note = Thymine with phosphorothioate linkage
  modified_base 9: mod_base = OTHER; note = Nucleotide with phosphorothioate linkage
  modified_base 10: mod_base = OTHER; note = Nucleotide with phosphorothioate linkage
  modified_base 11: mod_base = OTHER; note = Nucleotide with phosphorothioate linkage
  modified_base 12: mod_base = OTHER; note = Nucleotide with phosphorothioate linkage
  modified_base 13: mod_base = OTHER; note = 5-methylcytosine with phosphorothioate linkage
  modified_base 14: mod_base = OTHER; note = Nucleotide with phosphorothioate linkage
  modified_base 15: mod_base = OTHER; note = Nucleotide with phosphorothioate linkage
  modified_base 16: mod_base = OTHER; note = 2'-O-methoxyethyl modified nucleotide with phosphorothioate linkage
  modified_base 17: mod_base = OTHER; note = 2'-O-methoxyethyl modified nucleotide with phosphorothioate linkage
  modified_base 18: mod_base = OTHER; note = 2'-O-methoxyethyl modified thymine with phosphorothioate linkage
  modified_base 19: mod_base = OTHER; note = 2'-O-methoxyethyl modified nucleotide with phosphorothioate linkage
  modified_base 20: mod_base = OTHER; note = 2'-O-methoxyethyl 5-methylcytosine
  misc_feature 1..5: note = RNA
  misc_feature 6..15: note = DNA
  misc_feature 16..20: note = RNA
gnagaggtgaagcgaagtgc

SEQ ID NO: 935 - DNA, 20 bp, synthetic construct
  source 1..20: mol_type = other DNA
  modified_base 1: mod_base = OTHER; note = 2'-O-methoxyethyl modified nucleotide with phosphorothioate linkage
  modified_base 2: mod_base = OTHER; note = 2'-O-methoxyethyl 5-methylcytosine with phosphorothioate linkage
  modified_base 3: mod_base = OTHER; note = Locked abasic nucleotide with phosphorothioate linkage
  modified_base 4: mod_base = OTHER; note = 2'-O-methoxyethyl modified nucleotide with phosphorothioate linkage
  modified_base 5: mod_base = OTHER; note = 2'-O-methoxyethyl modified nucleotide with phosphorothioate linkage
  modified_base 6: mod_base = OTHER; note = Nucleotide with phosphorothioate linkage
  modified_base 7: mod_base = OTHER; note = Nucleotide with phosphorothioate linkage
  modified_base 8: mod_base = OTHER; note = Thymine with phosphorothioate linkage
  modified_base 9: mod_base = OTHER; note = Nucleotide with phosphorothioate linkage
  modified_base 10: mod_base = OTHER; note = Nucleotide with phosphorothioate linkage
  modified_base 11: mod_base = OTHER; note = Nucleotide with phosphorothioate linkage
  modified_base 12: mod_base = OTHER; note = Nucleotide with phosphorothioate linkage
  modified_base 13: mod_base = OTHER; note = 5-methylcytosine with phosphorothioate linkage
  modified_base 14: mod_base = OTHER; note = Nucleotide with phosphorothioate linkage
  modified_base 15: mod_base = OTHER; note = Nucleotide with phosphorothioate linkage
  modified_base 16: mod_base = OTHER; note = 2'-O-methoxyethyl modified nucleotide with phosphorothioate linkage
  modified_base 17: mod_base = OTHER; note = 2'-O-methoxyethyl modified nucleotide with phosphorothioate linkage
  modified_base 18: mod_base = OTHER; note = 2'-O-methoxyethyl modified thymine with phosphorothioate linkage
  modified_base 19: mod_base = OTHER; note = 2'-O-methoxyethyl modified nucleotide with phosphorothioate linkage
  modified_base 20: mod_base = OTHER; note = 2'-O-methoxyethyl 5-methylcytosine
  misc_feature 1..5: note = RNA
  misc_feature 6..15: note = DNA
  misc_feature 16..20: note = RNA
gcngaggtgaagcgaagtgc

SEQ ID NO: 936 - DNA, 20 bp, synthetic construct
  source 1..20: mol_type = other DNA
  modified_base 1: mod_base = OTHER; note = 2'-O-methoxyethyl modified nucleotide with phosphorothioate linkage
  modified_base 2: mod_base = OTHER; note = 2'-O-methoxyethyl 5-methylcytosine with phosphorothioate linkage
  modified_base 3: mod_base = OTHER; note = 2'-O-methoxyethyl modified nucleotide with phosphorothioate linkage
  modified_base 4: mod_base = OTHER; note = Locked abasic nucleotide with phosphorothioate linkage
  modified_base 5: mod_base = OTHER; note = 2'-O-methoxyethyl modified nucleotide with phosphorothioate linkage
  modified_base 6: mod_base = OTHER; note = Nucleotide with phosphorothioate linkage
  modified_base 7: mod_base = OTHER; note = Nucleotide with phosphorothioate linkage
  modified_base 8: mod_base = OTHER; note = Thymine with phosphorothioate linkage
  modified_base 9: mod_base = OTHER; note = Nucleotide with phosphorothioate linkage
  modified_base 10: mod_base = OTHER; note = Nucleotide with phosphorothioate linkage
  modified_base 11: mod_base = OTHER; note = Nucleotide with phosphorothioate linkage
  modified_base 12: mod_base = OTHER; note = Nucleotide with phosphorothioate linkage
  modified_base 13: mod_base = OTHER; note = 5-methylcytosine with phosphorothioate linkage
  modified_base 14: mod_base = OTHER; note = Nucleotide with phosphorothioate linkage
  modified_base 15: mod_base = OTHER; note = Nucleotide with phosphorothioate linkage
  modified_base 16: mod_base = OTHER; note = 2'-O-methoxyethyl modified nucleotide with phosphorothioate linkage
  modified_base 17: mod_base = OTHER; note = 2'-O-methoxyethyl modified nucleotide with phosphorothioate linkage
  modified_base 18: mod_base = OTHER; note = 2'-O-methoxyethyl modified thymine with phosphorothioate linkage
  modified_base 19: mod_base = OTHER; note = 2'-O-methoxyethyl modified nucleotide with phosphorothioate linkage
  modified_base 20: mod_base = OTHER; note = 2'-O-methoxyethyl 5-methylcytosine
  misc_feature 1..5: note = RNA
  misc_feature 6..15: note = DNA
  misc_feature 16..20: note = RNA
gcanaggtgaagcgaagtgc

SEQ ID NO: 937 - DNA, 20 bp, synthetic construct
  source 1..20: mol_type = other DNA
  modified_base 1: mod_base = OTHER; note = 2'-O-methoxyethyl modified nucleotide with phosphorothioate linkage
  modified_base 2: mod_base = OTHER; note = 2'-O-methoxyethyl 5-methylcytosine with phosphorothioate linkage
  modified_base 3: mod_base = OTHER; note = 2'-O-methoxyethyl modified nucleotide with phosphorothioate linkage
  modified_base 4: mod_base = OTHER; note = 2'-O-methoxyethyl modified nucleotide with phosphorothioate linkage
  modified_base 5: mod_base = OTHER; note = Locked abasic nucleotide with phosphorothioate linkage
  modified_base 6: mod_base = OTHER; note = Nucleotide with phosphorothioate linkage
  modified_base 7: mod_base = OTHER; note = Nucleotide with phosphorothioate linkage
  modified_base 8: mod_base = OTHER; note = Thymine with phosphorothioate linkage
  modified_base 9: mod_base = OTHER; note = Nucleotide with phosphorothioate linkage
  modified_base 10: mod_base = OTHER; note = Nucleotide with phosphorothioate linkage
  modified_base 11: mod_base = OTHER; note = Nucleotide with phosphorothioate linkage
  modified_base 12: mod_base = OTHER; note = Nucleotide with phosphorothioate linkage
  modified_base 13: mod_base = OTHER; note = 5-methylcytosine with phosphorothioate linkage
  modified_base 14: mod_base = OTHER; note = Nucleotide with phosphorothioate linkage
  modified_base 15: mod_base = OTHER; note = Nucleotide with phosphorothioate linkage
  modified_base 16: mod_base = OTHER; note = 2'-O-methoxyethyl modified nucleotide with phosphorothioate linkage
  modified_base 17: mod_base = OTHER; note = 2'-O-methoxyethyl modified nucleotide with phosphorothioate linkage
  modified_base 18: mod_base = OTHER; note = 2'-O-methoxyethyl modified thymine with phosphorothioate linkage
  modified_base 19: mod_base = OTHER; note = 2'-O-methoxyethyl modified nucleotide with phosphorothioate linkage
  modified_base 20: mod_base = OTHER; note = 2'-O-methoxyethyl 5-methylcytosine
  misc_feature 1..5: note = RNA
  misc_feature 6..15: note = DNA
  misc_feature 16..20: note = RNA
gcagnggtgaagcgaagtgc

SEQ ID NO: 938 - DNA, 20 bp, synthetic construct
  source 1..20: mol_type = other DNA
  modified_base 1: mod_base = OTHER; note = 2'-O-methoxyethyl modified nucleotide with phosphorothioate linkage
  modified_base 2: mod_base = OTHER; note = 2'-O-methoxyethyl 5-methylcytosine with phosphorothioate linkage
  modified_base 3: mod_base = OTHER; note = 2'-O-methoxyethyl modified nucleotide with phosphorothioate linkage
  modified_base 4: mod_base = OTHER; note = 2'-O-methoxyethyl modified nucleotide with phosphorothioate linkage
  modified_base 5: mod_base = OTHER; note = 2'-O-methoxyethyl modified nucleotide with phosphorothioate linkage
  modified_base 6: mod_base = OTHER; note = Nucleotide with phosphorothioate linkage
  modified_base 7: mod_base = OTHER; note = Nucleotide with phosphorothioate linkage
  modified_base 8: mod_base = OTHER; note = Thymine with phosphorothioate linkage
  modified_base 9: mod_base = OTHER; note = Nucleotide with phosphorothioate linkage
  modified_base 10: mod_base = OTHER; note = Nucleotide with phosphorothioate linkage
  modified_base 11: mod_base = OTHER; note = Nucleotide with phosphorothioate linkage
  modified_base 12: mod_base = OTHER; note = Nucleotide with phosphorothioate linkage
  modified_base 13: mod_base = OTHER; note = 5-methylcytosine with phosphorothioate linkage
  modified_base 14: mod_base = OTHER; note = Nucleotide with phosphorothioate linkage
  modified_base 15: mod_base = OTHER; note = Nucleotide with phosphorothioate linkage
  modified_base 16: mod_base = OTHER; note = Locked abasic nucleotide with phosphorothioate linkage
  modified_base 17: mod_base = OTHER; note = 2'-O-methoxyethyl modified nucleotide with phosphorothioate linkage
  modified_base 18: mod_base = OTHER; note = 2'-O-methoxyethyl modified thymine with phosphorothioate linkage
  modified_base 19: mod_base = OTHER; note = 2'-O-methoxyethyl modified nucleotide with phosphorothioate linkage
  modified_base 20: mod_base = OTHER; note = 2'-O-methoxyethyl 5-methylcytosine
  misc_feature 1..5: note = RNA
  misc_feature 6..15: note = DNA
  misc_feature 16..20: note = RNA
gcagaggtgaagcgangtgc

SEQ ID NO: 939 - DNA, 20 bp, synthetic construct
  source 1..20: mol_type = other DNA
  modified_base 1: mod_base = OTHER; note = 2'-O-methoxyethyl modified nucleotide with phosphorothioate linkage
  modified_base 2: mod_base = OTHER; note = 2'-O-methoxyethyl 5-methylcytosine with phosphorothioate linkage
  modified_base 3: mod_base = OTHER; note = 2'-O-methoxyethyl modified nucleotide with phosphorothioate linkage
  modified_base 4: mod_base = OTHER; note = 2'-O-methoxyethyl modified nucleotide with phosphorothioate linkage
  modified_base 5: mod_base = OTHER; note = 2'-O-methoxyethyl modified nucleotide with phosphorothioate linkage
  modified_base 6: mod_base = OTHER; note = Nucleotide with phosphorothioate linkage
  modified_base 7: mod_base = OTHER; note = Nucleotide with phosphorothioate linkage
  modified_base 8: mod_base = OTHER; note = Thymine with phosphorothioate linkage
  modified_base 9: mod_base = OTHER; note = Nucleotide with phosphorothioate linkage
  modified_base 10: mod_base = OTHER; note = Nucleotide with phosphorothioate linkage
  modified_base 11: mod_base = OTHER; note = Nucleotide with phosphorothioate linkage
  modified_base 12: mod_base = OTHER; note = Nucleotide with phosphorothioate linkage
  modified_base 13: mod_base = OTHER; note = 5-methylcytosine with phosphorothioate linkage
  modified_base 14: mod_base = OTHER; note = Nucleotide with phosphorothioate linkage
  modified_base 15: mod_base = OTHER; note = Nucleotide with phosphorothioate linkage
  modified_base 16: mod_base = OTHER; note = 2'-O-methoxyethyl modified nucleotide with phosphorothioate linkage
  modified_base 17: mod_base = OTHER; note = Locked abasic nucleotide with phosphorothioate linkage
  modified_base 18: mod_base = OTHER; note = 2'-O-methoxyethyl modified thymine with phosphorothioate linkage
  modified_base 19: mod_base = OTHER; note = 2'-O-methoxyethyl modified nucleotide with phosphorothioate linkage
  modified_base 20: mod_base = OTHER; note = 2'-O-methoxyethyl 5-methylcytosine
  misc_feature 1..5: note = RNA
  misc_feature 6..15: note = DNA
  misc_feature 16..20: note = RNA
gcagaggtgaagcgaantgc

SEQ ID NO: 940 - DNA, 20 bp, synthetic construct
  source 1..20: mol_type = other DNA
  modified_base 1: mod_base = OTHER; note = 2'-O-methoxyethyl modified nucleotide with phosphorothioate linkage
  modified_base 2: mod_base = OTHER; note = 2'-O-methoxyethyl 5-methylcytosine with phosphorothioate linkage
  modified_base 3: mod_base = OTHER; note = 2'-O-methoxyethyl modified nucleotide with phosphorothioate linkage
  modified_base 4: mod_base = OTHER; note = 2'-O-methoxyethyl modified nucleotide with phosphorothioate linkage
  modified_base 5: mod_base = OTHER; note = 2'-O-methoxyethyl modified nucleotide with phosphorothioate linkage
  modified_base 6: mod_base = OTHER; note = Nucleotide with phosphorothioate linkage
  modified_base 7: mod_base = OTHER; note = Nucleotide with phosphorothioate linkage
  modified_base 8: mod_base = OTHER; note = Thymine with phosphorothioate linkage
  modified_base 9: mod_base = OTHER; note = Nucleotide with phosphorothioate linkage
  modified_base 10: mod_base = OTHER; note = Nucleotide with phosphorothioate linkage
  modified_base 11: mod_base = OTHER; note = Nucleotide with phosphorothioate linkage
  modified_base 12: mod_base = OTHER; note = Nucleotide with phosphorothioate linkage
  modified_base 13: mod_base = OTHER; note = 5-methylcytosine with phosphorothioate linkage
  modified_base 14: mod_base = OTHER; note = Nucleotide with phosphorothioate linkage
  modified_base 15: mod_base = OTHER; note = Nucleotide with phosphorothioate linkage
  modified_base 16: mod_base = OTHER; note = 2'-O-methoxyethyl modified nucleotide with phosphorothioate linkage
  modified_base 17: mod_base = OTHER; note = 2'-O-methoxyethyl modified nucleotide with phosphorothioate linkage
  modified_base 18: mod_base = OTHER; note = Locked abasic nucleotide with phosphorothioate linkage
  modified_base 19: mod_base = OTHER; note = 2'-O-methoxyethyl modified nucleotide with phosphorothioate linkage
  modified_base 20: mod_base = OTHER; note = 2'-O-methoxyethyl 5-methylcytosine
  misc_feature 1..5: note = RNA
  misc_feature 6..15: note = DNA
  misc_feature 16..20: note = RNA
gcagaggtgaagcgaagngc

SEQ ID NO: 941 - DNA, 20 bp, synthetic construct
  source 1..20: mol_type = other DNA
  modified_base 1: mod_base = OTHER; note = 2'-O-methoxyethyl modified nucleotide with phosphorothioate linkage
  modified_base 2: mod_base = OTHER; note = 2'-O-methoxyethyl 5-methylcytosine with phosphorothioate linkage
  modified_base 3: mod_base = OTHER; note = 2'-O-methoxyethyl modified nucleotide with phosphorothioate linkage
  modified_base 4: mod_base = OTHER; note = 2'-O-methoxyethyl modified nucleotide with phosphorothioate linkage
  modified_base 5: mod_base = OTHER; note = 2'-O-methoxyethyl modified nucleotide with phosphorothioate linkage
  modified_base 6: mod_base = OTHER; note = Nucleotide with phosphorothioate linkage
  modified_base 7: mod_base = OTHER; note = Nucleotide with phosphorothioate linkage
  modified_base 8: mod_base = OTHER; note = Thymine with phosphorothioate linkage
  modified_base 9: mod_base = OTHER; note = Nucleotide with phosphorothioate linkage
  modified_base 10: mod_base = OTHER; note = Nucleotide with phosphorothioate linkage
  modified_base 11: mod_base = OTHER; note = Nucleotide with phosphorothioate linkage
  modified_base 12: mod_base = OTHER; note = Nucleotide with phosphorothioate linkage
  modified_base 13: mod_base = OTHER; note = 5-methylcytosine with phosphorothioate linkage
  modified_base 14: mod_base = OTHER; note = Nucleotide with phosphorothioate linkage
  modified_base 15: mod_base = OTHER; note = Nucleotide with phosphorothioate linkage
  modified_base 16: mod_base = OTHER; note = 2'-O-methoxyethyl modified nucleotide with phosphorothioate linkage
  modified_base 17: mod_base = OTHER; note = 2'-O-methoxyethyl modified nucleotide with phosphorothioate linkage
  modified_base 18: mod_base = OTHER; note = 2'-O-methoxyethyl modified thymine with phosphorothioate linkage
  modified_base 19: mod_base = OTHER; note = Locked abasic nucleotide with phosphorothioate linkage
  modified_base 20: mod_base = OTHER; note = 2'-O-methoxyethyl 5-methylcytosine
  misc_feature 1..5: note = RNA
  misc_feature 6..15: note = DNA
  misc_feature 16..20: note = RNA
gcagaggtgaagcgaagtnc

SEQ ID NO: 942 - DNA, 20 bp, synthetic construct
  source 1..20: mol_type = other DNA
  modified_base 1: mod_base = OTHER; note = 2'-O-methoxyethyl modified nucleotide with phosphorothioate linkage
  modified_base 2: mod_base = OTHER; note = 2'-O-methoxyethyl 5-methylcytosine with phosphorothioate linkage
  modified_base 3: mod_base = OTHER; note = 2'-O-methoxyethyl modified nucleotide with phosphorothioate linkage
  modified_base 4: mod_base = OTHER; note = 2'-O-methoxyethyl modified nucleotide with phosphorothioate linkage
  modified_base 5: mod_base = OTHER; note = 2'-O-methoxyethyl modified nucleotide with phosphorothioate linkage
  modified_base 6: mod_base = OTHER; note = Nucleotide with phosphorothioate linkage
  modified_base 7: mod_base = OTHER; note = Nucleotide with phosphorothioate linkage
  modified_base 8: mod_base = OTHER; note = Thymine with phosphorothioate linkage
  modified_base 9: mod_base = OTHER; note = Nucleotide with phosphorothioate linkage
  modified_base 10: mod_base = OTHER; note = Nucleotide with phosphorothioate linkage
  modified_base 11: mod_base = OTHER; note = Nucleotide with phosphorothioate linkage
  modified_base 12: mod_base = OTHER; note = Nucleotide with phosphorothioate linkage
  modified_base 13: mod_base = OTHER; note = 5-methylcytosine with phosphorothioate linkage
  modified_base 14: mod_base = OTHER; note = Nucleotide with phosphorothioate linkage
  modified_base 15: mod_base = OTHER; note = Nucleotide with phosphorothioate linkage
  modified_base 16: mod_base = OTHER; note = 2'-O-methoxyethyl modified nucleotide with phosphorothioate linkage
  modified_base 17: mod_base = OTHER; note = 2'-O-methoxyethyl modified nucleotide with phosphorothioate linkage
  modified_base 18: mod_base = OTHER; note = 2'-O-methoxyethyl modified thymine with phosphorothioate linkage
  modified_base 19: mod_base = OTHER; note = 2'-O-methoxyethyl modified nucleotide with phosphorothioate linkage
  modified_base 20: mod_base = OTHER; note = Locked abasic nucleotide
  misc_feature 1..5: note = RNA
  misc_feature 6..15: note = DNA
  misc_feature 16..20: note = RNA
gcagaggtgaagcgaagtgn

SEQ ID NO: 943 - DNA, 20 bp, synthetic construct
  source 1..20: mol_type = other DNA
  modified_base 1: mod_base = OTHER; note = 2'-O-methoxyethyl modified abasic nucleotide with phosphorothioate linkage
  modified_base 2: mod_base = OTHER; note = 2'-O-methoxyethyl 5-methylcytosine with phosphorothioate linkage
  modified_base 3: mod_base = OTHER; note = 2'-O-methoxyethyl modified nucleotide with phosphorothioate linkage
  modified_base 4: mod_base = OTHER; note = 2'-O-methoxyethyl modified nucleotide with phosphorothioate linkage
  modified_base 5: mod_base = OTHER; note = 2'-O-methoxyethyl modified nucleotide with phosphorothioate linkage
  modified_base 6: mod_base = OTHER; note = Nucleotide with phosphorothioate linkage
  modified_base 7: mod_base = OTHER; note = Nucleotide with phosphorothioate linkage
  modified_base 8: mod_base = OTHER; note = Thymine with phosphorothioate linkage
  modified_base 9: mod_base = OTHER; note = Nucleotide with phosphorothioate linkage
  modified_base 10: mod_base = OTHER; note = Nucleotide with phosphorothioate linkage
  modified_base 11: mod_base = OTHER; note = Nucleotide with phosphorothioate linkage
  modified_base 12: mod_base = OTHER; note = Nucleotide with phosphorothioate linkage
  modified_base 13: mod_base = OTHER; note = 5-methylcytosine with phosphorothioate linkage
  modified_base 14: mod_base = OTHER; note = Nucleotide with phosphorothioate linkage
  modified_base 15: mod_base = OTHER; note = Nucleotide with phosphorothioate linkage
  modified_base 16: mod_base = OTHER; note = 2'-O-methoxyethyl modified nucleotide with phosphorothioate linkage
  modified_base 17: mod_base = OTHER; note = 2'-O-methoxyethyl modified nucleotide with phosphorothioate linkage
  modified_base 18: mod_base = OTHER; note = 2'-O-methoxyethyl modified thymine with phosphorothioate linkage
  modified_base 19: mod_base = OTHER; note = 2'-O-methoxyethyl modified nucleotide with phosphorothioate linkage
  modified_base 20: mod_base = OTHER; note = 2'-O-methoxyethyl 5-methylcytosine
  misc_feature 1..5: note = RNA
  misc_feature 6..15: note = DNA
  misc_feature 16..20: note = RNA
ncagaggtgaagcgaagtgc

SEQ ID NO: 944 - DNA, 20 bp, synthetic construct
  source 1..20: mol_type = other DNA
  modified_base 1: mod_base = OTHER; note = 2'-O-methoxyethyl modified nucleotide with phosphorothioate linkage
  modified_base 2: mod_base = OTHER; note = 2'-O-methoxyethyl modified abasic nucleotide with phosphorothioate linkage
  modified_base 3: mod_base = OTHER; note = 2'-O-methoxyethyl modified nucleotide with phosphorothioate linkage
  modified_base 4: mod_base = OTHER; note = 2'-O-methoxyethyl modified nucleotide with phosphorothioate linkage
  modified_base 5: mod_base = OTHER; note = 2'-O-methoxyethyl modified nucleotide with phosphorothioate linkage
  modified_base 6: mod_base = OTHER; note = Nucleotide with phosphorothioate linkage
  modified_base 7: mod_base = OTHER; note = Nucleotide with phosphorothioate linkage
  modified_base 8: mod_base = OTHER; note = Thymine with phosphorothioate linkage
  modified_base 9: mod_base = OTHER; note = Nucleotide with phosphorothioate linkage
  modified_base 10: mod_base = OTHER; note = Nucleotide with phosphorothioate linkage
  modified_base 11: mod_base = OTHER; note = Nucleotide with phosphorothioate linkage
  modified_base 12: mod_base = OTHER; note = Nucleotide with phosphorothioate linkage
  modified_base 13: mod_base = OTHER; note = 5-methylcytosine with phosphorothioate linkage
  modified_base 14: mod_base = OTHER; note = Nucleotide with phosphorothioate linkage
  modified_base 15: mod_base = OTHER; note = Nucleotide with phosphorothioate linkage
  modified_base 16: mod_base = OTHER; note = 2'-O-methoxyethyl modified nucleotide with phosphorothioate linkage
  modified_base 17: mod_base = OTHER; note = 2'-O-methoxyethyl modified nucleotide with phosphorothioate linkage
  modified_base 18: mod_base = OTHER; note = 2'-O-methoxyethyl modified thymine with phosphorothioate linkage
  modified_base 19: mod_base = OTHER; note = 2'-O-methoxyethyl modified nucleotide with phosphorothioate linkage
  modified_base 20: mod_base = OTHER; note = 2'-O-methoxyethyl 5-methylcytosine
  misc_feature 1..5: note = RNA
  misc_feature 6..15: note = DNA
  misc_feature 16..20: note = RNA
gnagaggtgaagcgaagtgc

SEQ ID NO: 945 - DNA, 20 bp, synthetic construct
  source 1..20: mol_type = other DNA
  modified_base 1: mod_base = OTHER; note = 2'-O-methoxyethyl modified nucleotide with phosphorothioate linkage
  modified_base 2: mod_base = OTHER; note = 2'-O-methoxyethyl 5-methylcytosine with phosphorothioate linkage
  modified_base 3: mod_base = OTHER; note = 2'-O-methoxyethyl modified abasic nucleotide with phosphorothioate linkage
  modified_base 4: mod_base = OTHER; note = 2'-O-methoxyethyl modified nucleotide with phosphorothioate linkage
  modified_base 5: mod_base = OTHER; note = 2'-O-methoxyethyl modified nucleotide with phosphorothioate linkage
  modified_base 6: mod_base = OTHER; note = Nucleotide with phosphorothioate linkage
  modified_base 7: mod_base = OTHER; note = Nucleotide with phosphorothioate linkage
  modified_base 8: mod_base = OTHER; note = Thymine with phosphorothioate linkage
  modified_base 9: mod_base = OTHER; note = Nucleotide with phosphorothioate linkage
  modified_base 10: mod_base = OTHER; note = Nucleotide with phosphorothioate linkage
  modified_base 11: mod_base = OTHER; note = Nucleotide with phosphorothioate linkage
  modified_base 12: mod_base = OTHER; note = Nucleotide with phosphorothioate linkage
  modified_base 13: mod_base = OTHER; note = 5-methylcytosine with phosphorothioate linkage
  modified_base 14: mod_base = OTHER; note = Nucleotide with phosphorothioate linkage
  modified_base 15: mod_base = OTHER; note = Nucleotide with phosphorothioate linkage
  modified_base 16: mod_base = OTHER; note = 2'-O-methoxyethyl modified nucleotide with phosphorothioate linkage
  modified_base 17: mod_base = OTHER; note = 2'-O-methoxyethyl modified nucleotide with phosphorothioate linkage
  modified_base 18: mod_base = OTHER; note = 2'-O-methoxyethyl modified thymine with phosphorothioate linkage
  modified_base 19: mod_base = OTHER; note = 2'-O-methoxyethyl modified nucleotide with phosphorothioate linkage
  modified_base 20: mod_base = OTHER; note = 2'-O-methoxyethyl 5-methylcytosine
  misc_feature 1..5: note = RNA
  misc_feature 6..15: note = DNA
  misc_feature 16..20: note = RNA
gcngaggtgaagcgaagtgc

SEQ ID NO: 946 - DNA, 20 bp, synthetic construct
  source 1..20: mol_type = other DNA
  modified_base 1: mod_base = OTHER; note = 2'-O-methoxyethyl modified nucleotide with phosphorothioate linkage
  modified_base 2: mod_base = OTHER; note = 2'-O-methoxyethyl 5-methylcytosine with phosphorothioate linkage
  modified_base 3: mod_base = OTHER; note = 2'-O-methoxyethyl modified nucleotide with phosphorothioate linkage
  modified_base 4: mod_base = OTHER; note = 2'-O-methoxyethyl modified abasic nucleotide with phosphorothioate linkage
  modified_base 5: mod_base = OTHER; note = 2'-O-methoxyethyl modified nucleotide with phosphorothioate linkage
  modified_base 6: mod_base = OTHER; note = Nucleotide with phosphorothioate linkage
  modified_base 7: mod_base = OTHER; note = Nucleotide with phosphorothioate linkage
  modified_base 8: mod_base = OTHER; note = Thymine with phosphorothioate linkage
  modified_base 9: mod_base = OTHER; note = Nucleotide with phosphorothioate linkage
  modified_base 10: mod_base = OTHER; note = Nucleotide with phosphorothioate linkage
  modified_base 11: mod_base = OTHER; note = Nucleotide with phosphorothioate linkage
  modified_base 12: mod_base = OTHER; note = Nucleotide with phosphorothioate linkage
  modified_base 13: mod_base = OTHER; note = 5-methylcytosine with phosphorothioate linkage
  modified_base 14: mod_base = OTHER; note = Nucleotide with phosphorothioate linkage
  modified_base 15: mod_base = OTHER; note = Nucleotide with phosphorothioate linkage
  modified_base 16: mod_base = OTHER; note = 2'-O-methoxyethyl modified nucleotide with phosphorothioate linkage
  modified_base 17: mod_base = OTHER; note = 2'-O-methoxyethyl modified nucleotide with phosphorothioate linkage
  modified_base 18: mod_base = OTHER; note = 2'-O-methoxyethyl modified thymine with phosphorothioate linkage
  modified_base 19: mod_base = OTHER; note = 2'-O-methoxyethyl modified nucleotide with phosphorothioate linkage
  modified_base 20: mod_base = OTHER; note = 2'-O-methoxyethyl 5-methylcytosine
  misc_feature 1..5: note = RNA
  misc_feature 6..15: note = DNA
  misc_feature 16..20: note = RNA
gcanaggtgaagcgaagtgc

SEQ ID NO: 947 - DNA, 20 bp, synthetic construct
  source 1..20: mol_type = other DNA
  modified_base 1: mod_base = OTHER; note = 2'-O-methoxyethyl modified nucleotide with phosphorothioate linkage
  modified_base 2: mod_base = OTHER; note = 2'-O-methoxyethyl 5-methylcytosine with phosphorothioate linkage
  modified_base 3: mod_base = OTHER; note = 2'-O-methoxyethyl modified nucleotide with phosphorothioate linkage
  modified_base 4: mod_base = OTHER; note = 2'-O-methoxyethyl modified nucleotide with phosphorothioate linkage
  modified_base 5: mod_base = OTHER; note = 2'-O-methoxyethyl modified abasic nucleotide with phosphorothioate linkage
  modified_base 6: mod_base = OTHER; note = Nucleotide with phosphorothioate linkage
  modified_base 7: mod_base = OTHER; note = Nucleotide with phosphorothioate linkage
  modified_base 8: mod_base = OTHER; note = Thymine with phosphorothioate linkage
  modified_base 9: mod_base = OTHER; note = Nucleotide with phosphorothioate linkage
  modified_base 10: mod_base = OTHER; note = Nucleotide with phosphorothioate linkage
  modified_base 11: mod_base = OTHER; note = Nucleotide with phosphorothioate linkage
  modified_base 12: mod_base = OTHER; note = Nucleotide with phosphorothioate linkage
  modified_base 13: mod_base = OTHER; note = 5-methylcytosine with phosphorothioate linkage
  modified_base 14: mod_base = OTHER; note = Nucleotide with phosphorothioate linkage
  modified_base 15: mod_base = OTHER; note = Nucleotide with phosphorothioate linkage
  modified_base 16: mod_base = OTHER; note = 2'-O-methoxyethyl modified nucleotide with phosphorothioate linkage
  modified_base 17: mod_base = OTHER; note = 2'-O-methoxyethyl modified nucleotide with phosphorothioate linkage
  modified_base 18: mod_base = OTHER; note = 2'-O-methoxyethyl modified thymine with phosphorothioate linkage
  modified_base 19: mod_base = OTHER; note = 2'-O-methoxyethyl modified nucleotide with phosphorothioate linkage
  modified_base 20: mod_base = OTHER; note = 2'-O-methoxyethyl 5-methylcytosine
  misc_feature 1..5: note = RNA
  misc_feature 6..15: note = DNA
  misc_feature 16..20: note = RNA
gcagnggtgaagcgaagtgc

SEQ ID NO: 948 - DNA, 20 bp, synthetic construct
  source 1..20: mol_type = other DNA
  modified_base 1: mod_base = OTHER; note = 2'-O-methoxyethyl modified nucleotide with phosphorothioate linkage
  modified_base 2: mod_base = OTHER; note = 2'-O-methoxyethyl 5-methylcytosine with phosphorothioate linkage
  modified_base 3: mod_base = OTHER; note = 2'-O-methoxyethyl modified nucleotide with phosphorothioate linkage
  modified_base 4: mod_base = OTHER; note = 2'-O-methoxyethyl modified nucleotide with phosphorothioate linkage
  modified_base 5: mod_base = OTHER; note = 2'-O-methoxyethyl modified nucleotide with phosphorothioate linkage
  modified_base 6: mod_base = OTHER; note = Nucleotide with phosphorothioate linkage
  modified_base 7: mod_base = OTHER; note = Nucleotide with phosphorothioate linkage
  modified_base 8: mod_base = OTHER; note = Thymine with phosphorothioate linkage
  modified_base 9: mod_base = OTHER; note = Nucleotide with phosphorothioate linkage
  modified_base 10: mod_base = OTHER; note = Nucleotide with phosphorothioate linkage
  modified_base 11: mod_base = OTHER; note = Nucleotide with phosphorothioate linkage
  modified_base 12: mod_base = OTHER; note = Nucleotide with phosphorothioate linkage
  modified_base 13: mod_base = OTHER; note = 5-methylcytosine with phosphorothioate linkage
  modified_base 14: mod_base = OTHER; note = Nucleotide with phosphorothioate linkage
  modified_base 15: mod_base = OTHER; note = Nucleotide with phosphorothioate linkage
  modified_base 16: mod_base = OTHER; note = 2'-O-methoxyethyl modified abasic nucleotide with phosphorothioate linkage
  modified_base 17: mod_base = OTHER; note = 2'-O-methoxyethyl modified nucleotide with phosphorothioate linkage
  modified_base 18: mod_base = OTHER; note = 2'-O-methoxyethyl modified thymine with phosphorothioate linkage
  modified_base 19: mod_base = OTHER; note = 2'-O-methoxyethyl modified nucleotide with phosphorothioate linkage
  modified_base 20: mod_base = OTHER; note = 2'-O-methoxyethyl 5-methylcytosine
  misc_feature 1..5: note = RNA
  misc_feature 6..15: note = DNA
  misc_feature 16..20: note = RNA
gcagaggtgaagcgangtgc

SEQ ID NO: 949 - DNA, 20 bp, synthetic construct
  source 1..20: mol_type = other DNA
  modified_base 1: mod_base = OTHER; note = 2'-O-methoxyethyl modified nucleotide with phosphorothioate linkage
  modified_base 2: mod_base = OTHER; note = 2'-O-methoxyethyl 5-methylcytosine with phosphorothioate linkage
  modified_base 3: mod_base = OTHER; note = 2'-O-methoxyethyl modified nucleotide with phosphorothioate linkage
  modified_base 4: mod_base = OTHER; note = 2'-O-methoxyethyl modified nucleotide with phosphorothioate linkage
  modified_base 5: mod_base = OTHER; note = 2'-O-methoxyethyl modified nucleotide with phosphorothioate linkage
  modified_base 6: mod_base = OTHER; note = Nucleotide with phosphorothioate linkage
  modified_base 7: mod_base = OTHER; note = Nucleotide with phosphorothioate linkage
  modified_base 8: mod_base = OTHER; note = Thymine with phosphorothioate linkage
  modified_base 9: mod_base = OTHER; note = Nucleotide with phosphorothioate linkage
  modified_base 10: mod_base = OTHER; note = Nucleotide with phosphorothioate linkage
  modified_base 11: mod_base = OTHER; note = Nucleotide with phosphorothioate linkage
  modified_base 12: mod_base = OTHER; note = Nucleotide with phosphorothioate linkage
  modified_base 13: mod_base = OTHER; note = 5-methylcytosine with phosphorothioate linkage
  modified_base 14: mod_base = OTHER; note = Nucleotide with phosphorothioate linkage
  modified_base 15: mod_base = OTHER; note = Nucleotide with phosphorothioate linkage
  modified_base 16: mod_base = OTHER; note = 2'-O-methoxyethyl modified nucleotide with phosphorothioate linkage
  modified_base 17: mod_base = OTHER; note = 2'-O-methoxyethyl modified abasic nucleotide with phosphorothioate linkage
  modified_base 18: mod_base = OTHER; note = 2'-O-methoxyethyl modified thymine with phosphorothioate linkage
  modified_base 19: mod_base = OTHER; note = 2'-O-methoxyethyl modified nucleotide with phosphorothioate linkage
  modified_base 20: mod_base = OTHER; note = 2'-O-methoxyethyl 5-methylcytosine
  misc_feature 1..5: note = RNA
  misc_feature 6..15: note = DNA
  misc_feature 16..20: note = RNA
gcagaggtgaagcgaantgc

SEQ ID NO: 950 - DNA, 20 bp, synthetic construct
  source 1..20: mol_type = other DNA
  modified_base 1: mod_base = OTHER; note = 2'-O-methoxyethyl modified nucleotide with phosphorothioate linkage
  modified_base 2: mod_base = OTHER; note = 2'-O-methoxyethyl 5-methylcytosine with phosphorothioate linkage
  modified_base 3: mod_base = OTHER; note = 2'-O-methoxyethyl modified nucleotide with phosphorothioate linkage
  modified_base 4: mod_base = OTHER; note = 2'-O-methoxyethyl modified nucleotide with phosphorothioate linkage
  modified_base 5: mod_base = OTHER; note = 2'-O-methoxyethyl modified nucleotide with phosphorothioate linkage
  modified_base 6: mod_base = OTHER; note = Nucleotide with phosphorothioate linkage
  modified_base 7: mod_base = OTHER; note = Nucleotide with phosphorothioate linkage
  modified_base 8: mod_base = OTHER; note = Thymine with phosphorothioate linkage
  modified_base 9: mod_base = OTHER; note = Nucleotide with phosphorothioate linkage
  modified_base 10: mod_base = OTHER; note = Nucleotide with phosphorothioate linkage
  modified_base 11: mod_base = OTHER; note = Nucleotide with phosphorothioate linkage
  modified_base 12: mod_base = OTHER; note = Nucleotide with phosphorothioate linkage
  modified_base 13: mod_base = OTHER; note = 5-methylcytosine with phosphorothioate linkage
  modified_base 14: mod_base = OTHER; note = Nucleotide with phosphorothioate linkage
  modified_base 15: mod_base = OTHER; note = Nucleotide with phosphorothioate linkage
  modified_base 16: mod_base = OTHER; note = 2'-O-methoxyethyl modified nucleotide with phosphorothioate linkage
  modified_base 17: mod_base = OTHER; note = 2'-O-methoxyethyl modified nucleotide with phosphorothioate linkage
  modified_base 18: mod_base = OTHER; note = 2'-O-methoxyethyl modified abasic nucleotide with phosphorothioate linkage
  modified_base 19: mod_base = OTHER; note = 2'-O-methoxyethyl modified nucleotide with phosphorothioate linkage
  modified_base 20: mod_base = OTHER; note = 2'-O-methoxyethyl 5-methylcytosine
  misc_feature 1..5: note = RNA
  misc_feature 6..15: note = DNA
  misc_feature 16..20: note = RNA
gcagaggtgaagcgaagngc

SEQ ID NO: 951 - DNA, 20 bp, synthetic construct
  source 1..20: mol_type = other DNA
  modified_base 1: mod_base = OTHER; note = 2'-O-methoxyethyl modified nucleotide with phosphorothioate linkage
  modified_base 2: mod_base = OTHER; note = 2'-O-methoxyethyl 5-methylcytosine with phosphorothioate linkage
  modified_base 3: mod_base = OTHER; note = 2'-O-methoxyethyl modified nucleotide with phosphorothioate linkage
  modified_base 4: mod_base = OTHER; note = 2'-O-methoxyethyl modified nucleotide with phosphorothioate linkage
  modified_base 5: mod_base = OTHER; note = 2'-O-methoxyethyl modified nucleotide with phosphorothioate linkage
  modified_base 6: mod_base = OTHER; note = Nucleotide with phosphorothioate linkage
  modified_base 7: mod_base = OTHER; note = Nucleotide with phosphorothioate linkage
  modified_base 8: mod_base = OTHER; note = Thymine with phosphorothioate linkage
  modified_base 9: mod_base = OTHER; note = Nucleotide with phosphorothioate linkage
  modified_base 10: mod_base = OTHER; note = Nucleotide with phosphorothioate linkage
  modified_base 11: mod_base = OTHER; note = Nucleotide with phosphorothioate linkage
  modified_base 12: mod_base = OTHER; note = Nucleotide with phosphorothioate linkage
  modified_base 13: mod_base = OTHER; note = 5-methylcytosine with phosphorothioate linkage
  modified_base 14: mod_base = OTHER; note = Nucleotide with phosphorothioate linkage
  modified_base 15: mod_base = OTHER; note = Nucleotide with phosphorothioate linkage
  modified_base 16: mod_base = OTHER; note = 2'-O-methoxyethyl modified nucleotide with phosphorothioate linkage
  modified_base 17: mod_base = OTHER; note = 2'-O-methoxyethyl modified nucleotide with phosphorothioate linkage
  modified_base 18: mod_base = OTHER; note = 2'-O-methoxyethyl modified thymine with phosphorothioate linkage
  modified_base 19: mod_base = OTHER; note = 2'-O-methoxyethyl modified abasic nucleotide with phosphorothioate linkage
  modified_base 20: mod_base = OTHER; note = 2'-O-methoxyethyl 5-methylcytosine
  misc_feature 1..5: note = RNA
  misc_feature 6..15: note = DNA
  misc_feature 16..20: note = RNA
gcagaggtgaagcgaagtnc

SEQ ID NO: 952 - DNA, 20 bp, synthetic construct
  source 1..20: mol_type = other DNA
  modified_base 1: mod_base = OTHER; note = 2'-O-methoxyethyl modified nucleotide with phosphorothioate linkage
  modified_base 2: mod_base = OTHER; note = 2'-O-methoxyethyl 5-methylcytosine with phosphorothioate linkage
  modified_base 3: mod_base = OTHER; note = 2'-O-methoxyethyl modified nucleotide with phosphorothioate linkage
  modified_base 4: mod_base = OTHER; note = 2'-O-methoxyethyl modified nucleotide with phosphorothioate linkage
  modified_base 5: mod_base = OTHER; note = 2'-O-methoxyethyl modified nucleotide with phosphorothioate linkage
  modified_base 6: mod_base = OTHER; note = Nucleotide with phosphorothioate linkage
  modified_base 7: mod_base = OTHER; note = Nucleotide with phosphorothioate linkage
  modified_base 8: mod_base = OTHER; note = Thymine with phosphorothioate linkage
  modified_base 9: mod_base = OTHER; note = Nucleotide with phosphorothioate linkage
  modified_base 10: mod_base = OTHER; note = Nucleotide with phosphorothioate linkage
  modified_base 11: mod_base = OTHER; note = Nucleotide with phosphorothioate linkage
  modified_base 12: mod_base = OTHER; note = Nucleotide with phosphorothioate linkage
  modified_base 13: mod_base = OTHER; note = 5-methylcytosine with phosphorothioate linkage
  modified_base 14: mod_base = OTHER; note = Nucleotide with phosphorothioate linkage
  modified_base 15: mod_base = OTHER; note = Nucleotide with phosphorothioate linkage
  modified_base 16: mod_base = OTHER; note = 2'-O-methoxyethyl modified nucleotide with phosphorothioate linkage
  modified_base 17: mod_base = OTHER; note = 2'-O-methoxyethyl modified nucleotide with phosphorothioate linkage
  modified_base 18: mod_base = OTHER; note = 2'-O-methoxyethyl modified thymine with phosphorothioate linkage
  modified_base 19: mod_base = OTHER; note = 2'-O-methoxyethyl modified nucleotide with phosphorothioate linkage
  modified_base 20: mod_base = OTHER; note = 2'-O-methoxyethyl modified abasic nucleotide
  misc_feature 1..5: note = RNA
  misc_feature 6..15: note = DNA
  misc_feature 16..20: note = RNA
gcagaggtgaagcgaagtgn

SEQ ID NO: 953 - DNA, 20 bp, synthetic construct
  source 1..20: mol_type = other DNA
  modified_base 1: mod_base = OTHER; note = 2'-O-methoxyethyl modified nucleotide with phosphorothioate linkage
  modified_base 2: mod_base = OTHER; note = 2'-O-methoxyethyl 5-methylcytosine with phosphorothioate linkage
  modified_base 3: mod_base = OTHER; note = 2'-O-methoxyethyl modified nucleotide with phosphorothioate linkage
  modified_base 4: mod_base = OTHER; note = 2'-O-methoxyethyl modified nucleotide with phosphorothioate linkage
  modified_base 5: mod_base = OTHER; note = Nucleotide with phosphorothioate linkage
  modified_base 6: mod_base = OTHER; note = Nucleotide with phosphorothioate linkage
  modified_base 7: mod_base = OTHER; note = Nucleotide with phosphorothioate linkage
  modified_base 8: mod_base = OTHER; note = Thymine with phosphorothioate linkage
  modified_base 9: mod_base = OTHER; note = Nucleotide with phosphorothioate linkage
  modified_base 10: mod_base = OTHER; note = 2'-O-methoxyethyl modified abasic nucleotide with phosphorothioate linkage
  modified_base 11: mod_base = OTHER; note = Nucleotide with phosphorothioate linkage
  modified_base 12: mod_base = OTHER; note = Nucleotide with phosphorothioate linkage
  modified_base 13: mod_base = OTHER; note = 5-methylcytosine with phosphorothioate linkage
  modified_base 14: mod_base = OTHER; note = Nucleotide with phosphorothioate linkage
  modified_base 15: mod_base = OTHER; note = Nucleotide with phosphorothioate linkage
  modified_base 16: mod_base = OTHER; note = 2'-O-methoxyethyl modified nucleotide with phosphorothioate linkage
  modified_base 17: mod_base = OTHER; note = Locked nucleic acid with phosphorothioate linkage
  modified_base 18: mod_base = OTHER; note = 2'-O-methoxyethyl modified thymine with phosphorothioate linkage
  modified_base 19: mod_base = OTHER; note = Locked nucleic acid with phosphorothioate linkage
  modified_base 20: mod_base = OTHER; note = Locked 5-methylcytosine
  misc_feature 1..4: note = RNA
  misc_feature 5..9: note = DNA
  misc_feature 10: note = RNA
  misc_feature 11..15: note = DNA
  misc_feature 16..20: note = RNA
gcagaggtgnagcgaagtgc

SEQ ID NO: 954 - DNA, 20 bp, synthetic construct
  source 1..20: mol_type = other DNA
  modified_base 1: mod_base = OTHER; note = 2'-O-methoxyethyl modified nucleotide with phosphorothioate linkage
  modified_base 2: mod_base = OTHER; note = 2'-O-methoxyethyl 5-methylcytosine with phosphorothioate linkage
  modified_base 3: mod_base = OTHER; note = 2'-O-methoxyethyl modified nucleotide with phosphorothioate linkage
  modified_base 4: mod_base = OTHER; note = 2'-O-methoxyethyl modified nucleotide with phosphorothioate linkage
  modified_base 5: mod_base = OTHER; note = Nucleotide with phosphorothioate linkage
  modified_base 6: mod_base = OTHER; note = Nucleotide with phosphorothioate linkage
  modified_base 7: mod_base = OTHER; note = Nucleotide with phosphorothioate linkage
  modified_base 8: mod_base = OTHER; note = Thymine with phosphorothioate linkage
  modified_base 9: mod_base = OTHER; note = Nucleotide with phosphorothioate linkage
  modified_base 10: mod_base = OTHER; note = Locked abasic nucleotide with phosphorothioate linkage
  modified_base 11: mod_base = OTHER; note = Nucleotide with phosphorothioate linkage
  modified_base 12: mod_base = OTHER; note = Nucleotide with phosphorothioate linkage
  modified_base 13: mod_base = OTHER; note = 5-methylcytosine with phosphorothioate linkage
  modified_base 14: mod_base = OTHER; note = Nucleotide with phosphorothioate linkage
  modified_base 15: mod_base = OTHER; note = Nucleotide with phosphorothioate linkage
  modified_base 16: mod_base = OTHER; note = 2'-O-methoxyethyl modified nucleotide with phosphorothioate linkage
  modified_base 17: mod_base = OTHER; note = Locked nucleic acid with phosphorothioate linkage
  modified_base 18: mod_base = OTHER; note = 2'-O-methoxyethyl modified thymine with phosphorothioate linkage
  modified_base 19: mod_base = OTHER; note = Locked nucleic acid with phosphorothioate linkage
  modified_base 20: mod_base = OTHER; note = Locked 5-methylcytosine
  misc_feature 1..4: note = RNA
  misc_feature 5..9: note = DNA
  misc_feature 10: note = RNA
  misc_feature 11..15: note = DNA
  misc_feature 16..20: note = RNA
gcagaggtgnagcgaagtgc

SEQ ID NO: 955 - DNA, 20 bp, synthetic construct
  source 1..20: mol_type = other DNA
  modified_base 1: mod_base = OTHER; note = 2'-O-methoxyethyl modified nucleotide with phosphorothioate linkage
  modified_base 2: mod_base = OTHER; note = 2'-O-methoxyethyl 5-methylcytosine with phosphorothioate linkage
  modified_base 3: mod_base = OTHER; note = Locked nucleic acid with phosphorothioate linkage
  modified_base 4: mod_base = OTHER; note = 2'-O-methoxyethyl modified nucleotide with phosphorothioate linkage
  modified_base 5: mod_base = OTHER; note = Locked nucleic acid with phosphorothioate linkage
  modified_base 6: mod_base = OTHER; note = Nucleotide with phosphorothioate linkage
  modified_base 7: mod_base = OTHER; note = Nucleotide with phosphorothioate linkage
  modified_base 8: mod_base = OTHER; note = Thymine with phosphorothioate linkage
  modified_base 9: mod_base = OTHER; note = Nucleotide with phosphorothioate linkage
  modified_base 10: mod_base = OTHER; note = Nucleotide with phosphorothioate linkage
  modified_base 11: mod_base = OTHER; note = Nucleotide with phosphorothioate linkage
  modified_base 12: mod_base = OTHER; note = 5-methylcytosine with phosphorothioate linkage
  modified_base 13: mod_base = OTHER; note = 5-methylcytosine with phosphorothioate linkage
  modified_base 14: mod_base = OTHER; note = Nucleotide with phosphorothioate linkage
  modified_base 15: mod_base = OTHER; note = Nucleotide with phosphorothioate linkage
  modified_base 16: mod_base = OTHER; note = 2'-O-methoxyethyl modified nucleotide with phosphorothioate linkage
  modified_base 17: mod_base = OTHER; note = 2'-O-methoxyethyl modified nucleotide with phosphorothioate linkage
  modified_base 18: mod_base = OTHER; note = 2'-O-methoxyethyl modified thymine with phosphorothioate linkage
  modified_base 19: mod_base = OTHER; note = 2'-O-methoxyethyl modified nucleotide with phosphorothioate linkage
  modified_base 20: mod_base = OTHER; note = 2'-O-methoxyethyl 5-methylcytosine
  misc_feature 1..5: note = RNA
  misc_feature 6..15: note = DNA
  misc_feature 16..20: note = RNA
gcagaggtgaaccgaagtgc

SEQ ID NO: 956 - DNA, 20 bp, synthetic construct
  source 1..20: mol_type = other DNA
  modified_base 1: mod_base = OTHER; note = 2'-O-methoxyethyl modified nucleotide with phosphorothioate linkage
  modified_base 2: mod_base = OTHER; note = 2'-O-methoxyethyl 5-methylcytosine with phosphorothioate linkage
  modified_base 3: mod_base = OTHER; note = 2'-O-methoxyethyl modified nucleotide with phosphorothioate linkage
  modified_base 4: mod_base = OTHER; note = Locked nucleic acid with phosphorothioate linkage
  modified_base 5: mod_base = OTHER; note = Locked nucleic acid with phosphorothioate linkage
  modified_base 6: mod_base = OTHER; note = Nucleotide with phosphorothioate linkage
  modified_base 7: mod_base = OTHER; note = Nucleotide with phosphorothioate linkage
  modified_base 8: mod_base = OTHER; note = Thymine with phosphorothioate linkage
  modified_base 9: mod_base = OTHER; note = Nucleotide with phosphorothioate linkage
  modified_base 10: mod_base = OTHER; note = Nucleotide with phosphorothioate linkage
  modified_base 11: mod_base = OTHER; note = Nucleotide with phosphorothioate linkage
  modified_base 12: mod_base = OTHER; note = 5-methylcytosine with phosphorothioate linkage
  modified_base 13: mod_base = OTHER; note = 5-methylcytosine with phosphorothioate linkage
  modified_base 14: mod_base = OTHER; note = Nucleotide with phosphorothioate linkage
  modified_base 15: mod_base = OTHER; note = Nucleotide with phosphorothioate linkage
  modified_base 16: mod_base = OTHER; note = 2'-O-methoxyethyl modified nucleotide with phosphorothioate linkage
  modified_base 17: mod_base = OTHER; note = 2'-O-methoxyethyl modified nucleotide with phosphorothioate linkage
  modified_base 18: mod_base = OTHER; note = 2'-O-methoxyethyl modified thymine with phosphorothioate linkage
  modified_base 19: mod_base = OTHER; note = 2'-O-methoxyethyl modified nucleotide with phosphorothioate linkage
  modified_base 20: mod_base = OTHER; note = 2'-O-methoxyethyl 5-methylcytosine
  misc_feature 1..5: note = RNA
  misc_feature 6..15: note = DNA
  misc_feature 16..20: note = RNA
gcagaggtgaaccgaagtgc

SEQ ID NO: 957 - DNA, 20 bp, synthetic construct
  source 1..20: mol_type = other DNA
  modified_base 1: mod_base = OTHER; note = 2'-O-methoxyethyl modified nucleotide with phosphorothioate linkage
  modified_base 2: mod_base = OTHER; note = 2'-O-methoxyethyl 5-methylcytosine with phosphorothioate linkage
  modified_base 3: mod_base = OTHER; note = 2'-O-methoxyethyl modified nucleotide with phosphorothioate linkage
  modified_base 4: mod_base = OTHER; note = Locked nucleic acid with phosphorothioate linkage
  modified_base 5: mod_base = OTHER; note = 2'-O-methoxyethyl modified nucleotide with phosphorothioate linkage
  modified_base 6: mod_base = OTHER; note = Nucleotide with phosphorothioate linkage
  modified_base 7: mod_base = OTHER; note = Nucleotide with phosphorothioate linkage
  modified_base 8: mod_base = OTHER; note = Thymine with phosphorothioate linkage
  modified_base 9: mod_base = OTHER; note = Nucleotide with phosphorothioate linkage
  modified_base 10: mod_base = OTHER; note = Nucleotide with phosphorothioate linkage
  modified_base 11: mod_base = OTHER; note = Nucleotide with phosphorothioate linkage
  modified_base 12: mod_base = OTHER; note = 5-methylcytosine with phosphorothioate linkage
  modified_base 13: mod_base = OTHER; note = 5-methylcytosine with phosphorothioate linkage
  modified_base 14: mod_base = OTHER; note = Nucleotide with phosphorothioate linkage
  modified_base 15: mod_base = OTHER; note = Nucleotide with phosphorothioate linkage
  modified_base 16: mod_base = OTHER; note = Locked nucleic acid with phosphorothioate linkage
  modified_base 17: mod_base = OTHER; note = 2'-O-methoxyethyl modified nucleotide with phosphorothioate linkage
  modified_base 18: mod_base = OTHER; note = 2'-O-methoxyethyl modified thymine with phosphorothioate linkage
  modified_base 19: mod_base = OTHER; note = 2'-O-methoxyethyl modified nucleotide with phosphorothioate linkage
  modified_base 20: mod_base = OTHER; note = 2'-O-methoxyethyl 5-methylcytosine
  misc_feature 1..5: note = RNA
  misc_feature 6..15: note = DNA
  misc_feature 16..20: note = RNA
gcagaggtgaaccgaagtgc

SEQ ID NO: 958 - DNA, 20 bp, synthetic construct
  source 1..20: mol_type = other DNA
  modified_base 1: mod_base = OTHER; note = 2'-O-methoxyethyl modified nucleotide with phosphorothioate linkage
  modified_base 2: mod_base = OTHER; note = 2'-O-methoxyethyl 5-methylcytosine with phosphorothioate linkage
  modified_base 3: mod_base = OTHER; note = 2'-O-methoxyethyl modified nucleotide with phosphorothioate linkage
  modified_base 4: mod_base = OTHER; note = 2'-O-methoxyethyl modified nucleotide with phosphorothioate linkage
  modified_base 5: mod_base = OTHER; note = Locked nucleic acid with phosphorothioate linkage
  modified_base 6: mod_base = OTHER; note = Nucleotide with phosphorothioate linkage
  modified_base 7: mod_base = OTHER; note = Nucleotide with phosphorothioate linkage
  modified_base 8: mod_base = OTHER; note = Thymine with phosphorothioate linkage
  modified_base 9: mod_base = OTHER; note = Nucleotide with phosphorothioate linkage
  modified_base 10: mod_base = OTHER; note = Nucleotide with phosphorothioate linkage
  modified_base 11: mod_base = OTHER; note = Nucleotide with phosphorothioate linkage
  modified_base 12: mod_base = OTHER; note = 5-methylcytosine with phosphorothioate linkage
  modified_base 13: mod_base = OTHER; note = 5-methylcytosine with phosphorothioate linkage
  modified_base 14: mod_base = OTHER; note = Nucleotide with phosphorothioate linkage
  modified_base 15: mod_base = OTHER; note = Nucleotide with phosphorothioate linkage
  modified_base 16: mod_base = OTHER; note = Locked nucleic acid with phosphorothioate linkage
  modified_base 17: mod_base = OTHER; note = 2'-O-methoxyethyl modified nucleotide with phosphorothioate linkage
  modified_base 18: mod_base = OTHER; note = 2'-O-methoxyethyl modified thymine with phosphorothioate linkage
  modified_base 19: mod_base = OTHER; note = 2'-O-methoxyethyl modified nucleotide with phosphorothioate linkage
  modified_base 20: mod_base = OTHER; note = 2'-O-methoxyethyl 5-methylcytosine
  misc_feature 1..5: note = RNA
  misc_feature 6..15: note = DNA
  misc_feature 16..20: note = RNA
gcagaggtgaaccgaagtgc

SEQ ID NO: 959 - DNA, 20 bp, synthetic construct
  source 1..20: mol_type = other DNA
  modified_base 1: mod_base = OTHER; note = 2'-O-methoxyethyl modified nucleotide with phosphorothioate linkage
  modified_base 2: mod_base = OTHER; note = 2'-O-methoxyethyl 5-methylcytosine with phosphorothioate linkage
  modified_base 3: mod_base = OTHER; note = 2'-O-methoxyethyl modified nucleotide with phosphorothioate linkage
  modified_base 4: mod_base = OTHER; note = 2'-O-methoxyethyl modified nucleotide with phosphorothioate linkage
  modified_base 5: mod_base = OTHER; note = Locked nucleic acid with phosphorothioate linkage
  modified_base 6: mod_base = OTHER; note = Nucleotide with phosphorothioate linkage
  modified_base 7: mod_base = OTHER; note = Nucleotide with phosphorothioate linkage
  modified_base 8: mod_base = OTHER; note = Thymine with phosphorothioate linkage
  modified_base 9: mod_base = OTHER; note = Nucleotide with phosphorothioate linkage
  modified_base 10: mod_base = OTHER; note = Nucleotide with phosphorothioate linkage
  modified_base 11: mod_base = OTHER; note = Nucleotide with phosphorothioate linkage
  modified_base 12: mod_base = OTHER; note = 5-methylcytosine with phosphorothioate linkage
  modified_base 13: mod_base = OTHER; note = 5-methylcytosine with phosphorothioate linkage
  modified_base 14: mod_base = OTHER; note = Nucleotide with phosphorothioate linkage
  modified_base 15: mod_base = OTHER; note = Nucleotide with phosphorothioate linkage
  modified_base 16: mod_base = OTHER; note = 2'-O-methoxyethyl modified nucleotide with phosphorothioate linkage
  modified_base 17: mod_base = OTHER; note = 2'-O-methoxyethyl modified nucleotide with phosphorothioate linkage
  modified_base 18: mod_base = OTHER; note = 2'-O-methoxyethyl modified thymine with phosphorothioate linkage
  modified_base 19: mod_base = OTHER; note = Locked nucleic acid with phosphorothioate linkage
  modified_base 20: mod_base = OTHER; note = 2'-O-methoxyethyl 5-methylcytosine
  misc_feature 1..5: note = RNA
  misc_feature 6..15: note = DNA
  misc_feature 16..20: note = RNA
gcagaggtgaaccgaagtgc

SEQ ID NO: 960 - DNA, 20 bp, synthetic construct
  source 1..20: mol_type = other DNA
  modified_base 1: mod_base = OTHER; note = 2'-O-methoxyethyl modified nucleotide with phosphorothioate linkage
  modified_base 2: mod_base = OTHER; note = 2'-O-methoxyethyl 5-methylcytosine with phosphorothioate linkage
  modified_base 3: mod_base = OTHER; note = 2'-O-methoxyethyl modified nucleotide with phosphorothioate linkage
  modified_base 4: mod_base = OTHER; note = 2'-O-methoxyethyl modified nucleotide with phosphorothioate linkage
  modified_base 5: mod_base = OTHER; note = 2'-O-methoxyethyl modified nucleotide with phosphorothioate linkage
  modified_base 6: mod_base = OTHER; note = Nucleotide with phosphorothioate linkage
  modified_base 7: mod_base = OTHER; note = Nucleotide with phosphorothioate linkage
  modified_base 8: mod_base = OTHER; note = Thymine with phosphorothioate linkage
  modified_base 9: mod_base = OTHER; note = Nucleotide with phosphorothioate linkage
  modified_base 10: mod_base = OTHER; note = Nucleotide with phosphorothioate linkage
  modified_base 11: mod_base = OTHER; note = Nucleotide with phosphorothioate linkage
  modified_base 12: mod_base = OTHER; note = 5-methylcytosine with phosphorothioate linkage
  modified_base 13: mod_base = OTHER; note = 5-methylcytosine with phosphorothioate linkage
  modified_base 14: mod_base = OTHER; note = Nucleotide with phosphorothioate linkage
  modified_base 15: mod_base = OTHER; note = Nucleotide with phosphorothioate linkage
  modified_base 16: mod_base = OTHER; note = Locked nucleic acid with phosphorothioate linkage
  modified_base 17: mod_base = OTHER; note = 2'-O-methoxyethyl modified nucleotide with phosphorothioate linkage
  modified_base 18: mod_base = OTHER; note = Locked thymine with phosphorothioate linkage
  modified_base 19: mod_base = OTHER; note = 2'-O-methoxyethyl modified nucleotide with phosphorothioate linkage
  modified_base 20: mod_base = OTHER; note = 2'-O-methoxyethyl 5-methylcytosine
  misc_feature 1..5: note = RNA
  misc_feature 6..15: note = DNA
  misc_feature 16..20: note = RNA
gcagaggtgaaccgaagtgc

SEQ ID NO: 961 - DNA, 20 bp, synthetic construct
  source 1..20: mol_type = other DNA
  modified_base 1: mod_base = OTHER; note = 2'-O-methoxyethyl modified nucleotide with phosphorothioate linkage
  modified_base 2: mod_base = OTHER; note = 2'-O-methoxyethyl 5-methylcytosine with phosphorothioate linkage
  modified_base 3: mod_base = OTHER; note = Locked nucleic acid with phosphorothioate linkage
  modified_base 4: mod_base = OTHER; note = 2'-O-methoxyethyl modified nucleotide with phosphorothioate linkage
  modified_base 5: mod_base = OTHER; note = Locked nucleic acid with phosphorothioate linkage
  modified_base 6: mod_base = OTHER; note = Nucleotide with phosphorothioate linkage
  modified_base 7: mod_base = OTHER; note = Nucleotide with phosphorothioate linkage
  modified_base 8: mod_base = OTHER; note = Thymine with phosphorothioate linkage
  modified_base 9: mod_base = OTHER; note = Nucleotide with phosphorothioate linkage
  modified_base 10: mod_base = OTHER; note = Nucleotide with phosphorothioate linkage
  modified_base 11: mod_base = OTHER; note = Nucleotide with phosphorothioate linkage
  modified_base 12: mod_base = OTHER; note = Thymine with phosphorothioate linkage
  modified_base 13: mod_base = OTHER; note = 5-methylcytosine with phosphorothioate linkage
  modified_base 14: mod_base = OTHER; note = Nucleotide with phosphorothioate linkage
  modified_base 15: mod_base = OTHER; note = Nucleotide with phosphorothioate linkage
  modified_base 16: mod_base = OTHER; note = 2'-O-methoxyethyl modified nucleotide with phosphorothioate linkage
  modified_base 17: mod_base = OTHER; note = 2'-O-methoxyethyl modified nucleotide with phosphorothioate linkage
  modified_base 18: mod_base = OTHER; note = 2'-O-methoxyethyl modified thymine with phosphorothioate linkage
  modified_base 19: mod_base = OTHER; note = 2'-O-methoxyethyl modified nucleotide with phosphorothioate linkage
  modified_base 20: mod_base = OTHER; note = 2'-O-methoxyethyl 5-methylcytosine
  misc_feature 1..5: note = RNA
  misc_feature 6..15: note = DNA
  misc_feature 16..20: note = RNA
gcagaggtgaatcgaagtgc

SEQ ID NO: 962 - DNA, 20 bp, synthetic construct
  source 1..20: mol_type = other DNA
  modified_base 1: mod_base = OTHER; note = 2'-O-methoxyethyl modified nucleotide with phosphorothioate linkage
  modified_base 2: mod_base = OTHER; note = 2'-O-methoxyethyl 5-methylcytosine with phosphorothioate linkage
  modified_base 3: mod_base = OTHER; note = 2'-O-methoxyethyl modified nucleotide with phosphorothioate linkage
  modified_base 4: mod_base = OTHER; note = Locked nucleic acid with phosphorothioate linkage
  modified_base 5: mod_base = OTHER; note = Locked nucleic acid with phosphorothioate linkage
  modified_base 6: mod_base = OTHER; note = Nucleotide with phosphorothioate linkage
  modified_base 7: mod_base = OTHER; note = Nucleotide with phosphorothioate linkage
  modified_base 8: mod_base = OTHER; note = Thymine with phosphorothioate linkage
  modified_base 9: mod_base = OTHER; note = Nucleotide with phosphorothioate linkage
  modified_base 10: mod_base = OTHER; note = Nucleotide with phosphorothioate linkage
  modified_base 11: mod_base = OTHER; note = Nucleotide with phosphorothioate linkage
  modified_base 12: mod_base = OTHER; note = Thymine with phosphorothioate linkage
  modified_base 13: mod_base = OTHER; note = 5-methylcytosine with phosphorothioate linkage
  modified_base 14: mod_base = OTHER; note = Nucleotide with phosphorothioate linkage
  modified_base 15: mod_base = OTHER; note = Nucleotide with phosphorothioate linkage
  modified_base 16: mod_base = OTHER; note = 2'-O-methoxyethyl modified nucleotide with phosphorothioate linkage
  modified_base 17: mod_base = OTHER; note = 2'-O-methoxyethyl modified nucleotide with phosphorothioate linkage
  modified_base 18: mod_base = OTHER; note = 2'-O-methoxyethyl modified thymine with phosphorothioate linkage
  modified_base 19: mod_base = OTHER; note = 2'-O-methoxyethyl modified nucleotide with phosphorothioate linkage
  modified_base 20: mod_base = OTHER; note = 2'-O-methoxyethyl 5-methylcytosine
  misc_feature 1..5: note = RNA
  misc_feature 6..15: note = DNA
  misc_feature 16..20: note = RNA
gcagaggtgaatcgaagtgc

SEQ ID NO: 963 - DNA, 20 bp, synthetic construct
  source 1..20: mol_type = other DNA
  modified_base 1: mod_base = OTHER; note = 2'-O-methoxyethyl modified nucleotide with phosphorothioate linkage
  modified_base 2: mod_base = OTHER; note = 2'-O-methoxyethyl 5-methylcytosine with phosphorothioate linkage
  modified_base 3: mod_base = OTHER; note = 2'-O-methoxyethyl modified nucleotide with phosphorothioate linkage
  modified_base 4: mod_base = OTHER; note = Locked nucleic acid with phosphorothioate linkage
  modified_base 5: mod_base = OTHER; note = 2'-O-methoxyethyl modified nucleotide with phosphorothioate linkage
  modified_base 6: mod_base = OTHER; note = Nucleotide with phosphorothioate linkage
  modified_base 7: mod_base = OTHER; note = Nucleotide with phosphorothioate linkage
  modified_base 8: mod_base = OTHER; note = Thymine with phosphorothioate linkage
  modified_base 9: mod_base = OTHER; note = Nucleotide with phosphorothioate linkage
  modified_base 10: mod_base = OTHER; note = Nucleotide with phosphorothioate linkage
  modified_base 11: mod_base = OTHER; note = Nucleotide with phosphorothioate linkage
  modified_base 12: mod_base = OTHER; note = Thymine with phosphorothioate linkage
  modified_base 13: mod_base = OTHER; note = 5-methylcytosine with phosphorothioate linkage
  modified_base 14: mod_base = OTHER; note = Nucleotide with phosphorothioate linkage
  modified_base 15: mod_base = OTHER; note = Nucleotide with phosphorothioate linkage
  modified_base 16: mod_base = OTHER; note = Locked nucleic acid with phosphorothioate linkage
  modified_base 17: mod_base = OTHER; note = 2'-O-methoxyethyl modified nucleotide with phosphorothioate linkage
  modified_base 18: mod_base = OTHER; note = 2'-O-methoxyethyl modified thymine with phosphorothioate linkage
  modified_base 19: mod_base = OTHER; note = 2'-O-methoxyethyl modified nucleotide with phosphorothioate linkage
  modified_base 20: mod_base = OTHER; note = 2'-O-methoxyethyl 5-methylcytosine
  misc_feature 1..5: note = RNA
  misc_feature 6..15: note = DNA
  misc_feature 16..20: note = RNA
gcagaggtgaatcgaagtgc

SEQ ID NO: 964 - DNA, 20 bp, synthetic construct
  source 1..20: mol_type = other DNA
  modified_base 1: mod_base = OTHER; note = 2'-O-methoxyethyl modified nucleotide with phosphorothioate linkage
  modified_base 2: mod_base = OTHER; note = 2'-O-methoxyethyl 5-methylcytosine with phosphorothioate linkage
  modified_base 3: mod_base = OTHER; note = 2'-O-methoxyethyl modified nucleotide with phosphorothioate linkage
  modified_base 4: mod_base = OTHER; note = 2'-O-methoxyethyl modified nucleotide with phosphorothioate linkage
  modified_base 5: mod_base = OTHER; note = Locked nucleic acid with phosphorothioate linkage
  modified_base 6: mod_base = OTHER; note = Nucleotide with phosphorothioate linkage
  modified_base 7: mod_base = OTHER; note = Nucleotide with phosphorothioate linkage
  modified_base 8: mod_base = OTHER; note = Thymine with phosphorothioate linkage
  modified_base 9: mod_base = OTHER; note = Nucleotide with phosphorothioate linkage
  modified_base 10: mod_base = OTHER; note = Nucleotide with phosphorothioate linkage
  modified_base 11: mod_base = OTHER; note = Nucleotide with phosphorothioate linkage
  modified_base 12: mod_base = OTHER; note = Thymine with phosphorothioate linkage
  modified_base 13: mod_base = OTHER; note = 5-methylcytosine with phosphorothioate linkage
  modified_base 14: mod_base = OTHER; note = Nucleotide with phosphorothioate linkage
  modified_base 15: mod_base = OTHER; note = Nucleotide with phosphorothioate linkage
  modified_base 16: mod_base = OTHER; note = Locked nucleic acid with phosphorothioate linkage
  modified_base 17: mod_base = OTHER; note = 2'-O-methoxyethyl modified nucleotide with phosphorothioate linkage
  modified_base 18: mod_base = OTHER; note = 2'-O-methoxyethyl modified thymine with phosphorothioate linkage
  modified_base 19: mod_base = OTHER; note = 2'-O-methoxyethyl modified nucleotide with phosphorothioate linkage
  modified_base 20: mod_base = OTHER; note = 2'-O-methoxyethyl 5-methylcytosine
  misc_feature 1..5: note = RNA
  misc_feature 6..15: note = DNA
  misc_feature 16..20: note = RNA
gcagaggtgaatcgaagtgc

SEQ ID NO: 965 - DNA, 20 bp, synthetic construct
  source 1..20: mol_type = other DNA
  modified_base 1: mod_base = OTHER; note = 2'-O-methoxyethyl modified nucleotide with phosphorothioate linkage
  modified_base 2: mod_base = OTHER; note = 2'-O-methoxyethyl 5-methylcytosine with phosphorothioate linkage
  modified_base 3: mod_base = OTHER; note = 2'-O-methoxyethyl modified nucleotide with phosphorothioate linkage
  modified_base 4: mod_base = OTHER; note = 2'-O-methoxyethyl modified nucleotide with phosphorothioate linkage
  modified_base 5: mod_base = OTHER; note = Locked nucleic acid with phosphorothioate linkage
  modified_base 6: mod_base = OTHER; note = Nucleotide with phosphorothioate linkage
  modified_base 7: mod_base = OTHER; note = Nucleotide with phosphorothioate linkage
  modified_base 8: mod_base = OTHER; note = Thymine with phosphorothioate linkage
  modified_base 9: mod_base = OTHER; note = Nucleotide with phosphorothioate linkage
  modified_base 10: mod_base = OTHER; note = Nucleotide with phosphorothioate linkage
  modified_base 11: mod_base = OTHER; note = Nucleotide with phosphorothioate linkage
  modified_base 12: mod_base = OTHER; note = Thymine with phosphorothioate linkage
  modified_base 13: mod_base = OTHER; note = 5-methylcytosine with phosphorothioate linkage
  modified_base 14: mod_base = OTHER; note = Nucleotide with phosphorothioate linkage
  modified_base 15: mod_base = OTHER; note = Nucleotide with phosphorothioate linkage
  modified_base 16: mod_base = OTHER; note = 2'-O-methoxyethyl modified nucleotide with phosphorothioate linkage
  modified_base 17: mod_base = OTHER; note = 2'-O-methoxyethyl modified nucleotide with phosphorothioate linkage
  modified_base 18: mod_base = OTHER; note = 2'-O-methoxyethyl modified thymine with phosphorothioate linkage
  modified_base 19: mod_base = OTHER; note = Locked nucleic acid with phosphorothioate linkage
  modified_base 20: mod_base = OTHER; note = 2'-O-methoxyethyl 5-methylcytosine
  misc_feature 1..5: note = RNA
  misc_feature 6..15: note = DNA
  misc_feature 16..20: note = RNA
gcagaggtgaatcgaagtgc

SEQ ID NO: 966 - DNA, 20 bp, synthetic construct
  source 1..20: mol_type = other DNA
  modified_base 1: mod_base = OTHER; note = 2'-O-methoxyethyl modified nucleotide with phosphorothioate linkage
  modified_base 2: mod_base = OTHER; note = 2'-O-methoxyethyl 5-methylcytosine with phosphorothioate linkage
  modified_base 3: mod_base = OTHER; note = 2'-O-methoxyethyl modified nucleotide with phosphorothioate linkage
  modified_base 4: mod_base = OTHER; note = 2'-O-methoxyethyl modified nucleotide with phosphorothioate linkage
  modified_base 5: mod_base = OTHER; note = 2'-O-methoxyethyl modified nucleotide with phosphorothioate linkage
  modified_base 6: mod_base = OTHER; note = Nucleotide with phosphorothioate linkage
  modified_base 7: mod_base = OTHER; note = Nucleotide with phosphorothioate linkage
  modified_base 8: mod_base = OTHER; note = Thymine with phosphorothioate linkage
  modified_base 9: mod_base = OTHER; note = Nucleotide with phosphorothioate linkage
  modified_base 10: mod_base = OTHER; note = Nucleotide with phosphorothioate linkage
  modified_base 11: mod_base = OTHER; note = Nucleotide with phosphorothioate linkage
  modified_base 12: mod_base = OTHER; note = Thymine with phosphorothioate linkage
  modified_base 13: mod_base = OTHER; note = 5-methylcytosine with phosphorothioate linkage
  modified_base 14: mod_base = OTHER; note = Nucleotide with phosphorothioate linkage
  modified_base 15: mod_base = OTHER; note = Nucleotide with phosphorothioate linkage
  modified_base 16: mod_base = OTHER; note = Locked nucleic acid with phosphorothioate linkage
  modified_base 17: mod_base = OTHER; note = 2'-O-methoxyethyl modified nucleotide with phosphorothioate linkage
  modified_base 18: mod_base = OTHER; note = Locked thymine with phosphorothioate linkage
  modified_base 19: mod_base = OTHER; note = 2'-O-methoxyethyl modified nucleotide with phosphorothioate linkage
  modified_base 20: mod_base = OTHER; note = 2'-O-methoxyethyl 5-methylcytosine
  misc_feature 1..5: note = RNA
  misc_feature 6..15: note = DNA
  misc_feature 16..20: note = RNA
gcagaggtgaatcgaagtgc

SEQ ID NO: 967 - DNA, 20 bp, synthetic construct
  source 1..20: mol_type = other DNA
  modified_base 1: mod_base = OTHER; note = 2'-O-methoxyethyl modified nucleotide with phosphorothioate linkage
  modified_base 2: mod_base = OTHER; note = 2'-O-methoxyethyl 5-methylcytosine with phosphorothioate linkage
  modified_base 3: mod_base = OTHER; note = 2'-O-methoxyethyl modified nucleotide with phosphorothioate linkage
  modified_base 4: mod_base = OTHER; note = 2'-O-methoxyethyl modified nucleotide with phosphorothioate linkage
  modified_base 5: mod_base = OTHER; note = Locked nucleic acid with phosphorothioate linkage
  modified_base 6: mod_base = OTHER; note = Nucleotide with phosphorothioate linkage
  modified_base 7: mod_base = OTHER; note = Nucleotide with phosphorothioate linkage
  modified_base 8: mod_base = OTHER; note = Thymine with phosphorothioate linkage
  modified_base 9: mod_base = OTHER; note = 5-methylcytosine with phosphorothioate linkage
  modified_base 10: mod_base = OTHER; note = Nucleotide with phosphorothioate linkage
  modified_base 11: mod_base = OTHER; note = Nucleotide with phosphorothioate linkage
  modified_base 12: mod_base = OTHER; note = Nucleotide with phosphorothioate linkage
  modified_base 13: mod_base = OTHER; note = 5-methylcytosine with phosphorothioate linkage
  modified_base 14: mod_base = OTHER; note = Nucleotide with phosphorothioate linkage
  modified_base 15: mod_base = OTHER; note = Nucleotide with phosphorothioate linkage
  modified_base 16: mod_base = OTHER; note = 2'-O-methoxyethyl modified nucleotide with phosphorothioate linkage
  modified_base 17: mod_base = OTHER; note = 2'-O-methoxyethyl modified nucleotide with phosphorothioate linkage
  modified_base 18: mod_base = OTHER; note = 2'-O-methoxyethyl modified thymine with phosphorothioate linkage
  modified_base 19: mod_base = OTHER; note = 2'-O-methoxyethyl modified nucleotide with phosphorothioate linkage
  modified_base 20: mod_base = OTHER; note = 2'-O-methoxyethyl 5-methylcytosine
  misc_feature 1..5: note = RNA
  misc_feature 6..15: note = DNA
  misc_feature 16..20: note = RNA
gcagaggtcaagcgaagtgc

SEQ ID NO: 968 - DNA, 20 bp, synthetic construct
  source 1..20: mol_type = other DNA
  modified_base 1: mod_base = OTHER; note = 2'-O-methoxyethyl modified nucleotide with phosphorothioate linkage
  modified_base 2: mod_base = OTHER; note = 2'-O-methoxyethyl 5-methylcytosine with phosphorothioate linkage
  modified_base 3: mod_base = OTHER; note = 2'-O-methoxyethyl modified nucleotide with phosphorothioate linkage
  modified_base 4: mod_base = OTHER; note = 2'-O-methoxyethyl modified nucleotide with phosphorothioate linkage
  modified_base 5: mod_base = OTHER; note = 2'-O-methoxyethyl modified nucleotide with phosphorothioate linkage
  modified_base 6: mod_base = OTHER; note = Nucleotide with phosphorothioate linkage
  modified_base 7: mod_base = OTHER; note = Nucleotide with phosphorothioate linkage
  modified_base 8: mod_base = OTHER; note = Thymine with phosphorothioate linkage
  modified_base 9: mod_base = OTHER; note = 5-methylcytosine with phosphorothioate linkage
  modified_base 10: mod_base = OTHER; note = Nucleotide with phosphorothioate linkage
  modified_base 11: mod_base = OTHER; note = Nucleotide with phosphorothioate linkage
  modified_base 12: mod_base = OTHER; note = Nucleotide with phosphorothioate linkage
  modified_base 13: mod_base = OTHER; note = 5-methylcytosine with phosphorothioate linkage
  modified_base 14: mod_base = OTHER; note = Nucleotide with phosphorothioate linkage
  modified_base 15: mod_base = OTHER; note = Nucleotide with phosphorothioate linkage
  modified_base 16: mod_base = OTHER; note = 2'-O-methoxyethyl modified nucleotide with phosphorothioate linkage
  modified_base 17: mod_base = OTHER; note = Locked nucleic acid with phosphorothioate linkage
  modified_base 18: mod_base = OTHER; note = 2'-O-methoxyethyl modified thymine with phosphorothioate linkage
  modified_base 19: mod_base = OTHER; note = 2'-O-methoxyethyl modified nucleotide with phosphorothioate linkage
  modified_base 20: mod_base = OTHER; note = 2'-O-methoxyethyl 5-methylcytosine
  misc_feature 1..5: note = RNA
  misc_feature 6..15: note = DNA
  misc_feature 16..20: note = RNA
gcagaggtcaagcgaagtgc

SEQ ID NO: 969 - DNA, 20 bp, synthetic construct
  source 1..20: mol_type = other DNA
  modified_base 1: mod_base = OTHER; note = 2'-O-methoxyethyl modified nucleotide with phosphorothioate linkage
  modified_base 2: mod_base = OTHER; note = 2'-O-methoxyethyl 5-methylcytosine with phosphorothioate linkage
  modified_base 3: mod_base = OTHER; note = 2'-O-methoxyethyl modified nucleotide with phosphorothioate linkage
  modified_base 4: mod_base = OTHER; note = 2'-O-methoxyethyl modified nucleotide with phosphorothioate linkage
  modified_base 5: mod_base = OTHER; note = Locked nucleic acid with phosphorothioate linkage
  modified_base 6: mod_base = OTHER; note = Nucleotide with phosphorothioate linkage
  modified_base 7: mod_base = OTHER; note = Nucleotide with phosphorothioate linkage
  modified_base 8: mod_base = OTHER; note = Thymine with phosphorothioate linkage
  modified_base 9: mod_base = OTHER; note = Nucleotide with phosphorothioate linkage
  modified_base 10: mod_base = OTHER; note = Nucleotide with phosphorothioate linkage
  modified_base 11: mod_base = OTHER; note = Nucleotide with phosphorothioate linkage
  modified_base 12: mod_base = OTHER; note = Nucleotide with phosphorothioate linkage
  modified_base 13: mod_base = OTHER; note = 5-methylcytosine with phosphorothioate linkage
  modified_base 14: mod_base = OTHER; note = Nucleotide with phosphorothioate linkage
  modified_base 15: mod_base = OTHER; note = Nucleotide with phosphorothioate linkage
  modified_base 16: mod_base = OTHER; note = 2'-O-methoxyethyl modified nucleotide with phosphorothioate linkage
  modified_base 17: mod_base = OTHER; note = 2'-O-methoxyethyl modified nucleotide with phosphorothioate linkage
  modified_base 18: mod_base = OTHER; note = 2'-O-methoxyethyl modified thymine with phosphorothioate linkage
  modified_base 19: mod_base = OTHER; note = 2'-O-methoxyethyl modified nucleotide with phosphorothioate linkage
  modified_base 20: mod_base = OTHER; note = 2'-O-methoxyethyl 5-methylcytosine
  misc_feature 1..5: note = RNA
  misc_feature 6..15: note = DNA
  misc_feature 16..20: note = RNA
gcagaggtggagcgaagtgc

SEQ ID NO: 970 - DNA, 20 bp, synthetic construct
  source 1..20: mol_type = other DNA
  modified_base 1: mod_base = OTHER; note = 2'-O-methoxyethyl modified nucleotide with phosphorothioate linkage
  modified_base 2: mod_base = OTHER; note = 2'-O-methoxyethyl 5-methylcytosine with phosphorothioate linkage
  modified_base 3: mod_base = OTHER; note = 2'-O-methoxyethyl modified nucleotide with phosphorothioate linkage
  modified_base 4: mod_base = OTHER; note = 2'-O-methoxyethyl modified nucleotide with phosphorothioate linkage
  modified_base 5: mod_base = OTHER; note = 2'-O-methoxyethyl modified nucleotide with phosphorothioate linkage
  modified_base 6: mod_base = OTHER; note = Nucleotide with phosphorothioate linkage
  modified_base 7: mod_base = OTHER; note = Nucleotide with phosphorothioate linkage
  modified_base 8: mod_base = OTHER; note = Thymine with phosphorothioate linkage
  modified_base 9: mod_base = OTHER; note = Nucleotide with phosphorothioate linkage
  modified_base 10: mod_base = OTHER; note = Nucleotide with phosphorothioate linkage
  modified_base 11: mod_base = OTHER; note = Nucleotide with phosphorothioate linkage
  modified_base 12: mod_base = OTHER; note = Nucleotide with phosphorothioate linkage
  modified_base 13: mod_base = OTHER; note = 5-methylcytosine with phosphorothioate linkage
  modified_base 14: mod_base = OTHER; note = Nucleotide with phosphorothioate linkage
  modified_base 15: mod_base = OTHER; note = Nucleotide with phosphorothioate linkage
  modified_base 16: mod_base = OTHER; note = 2'-O-methoxyethyl modified nucleotide with phosphorothioate linkage
  modified_base 17: mod_base = OTHER; note = Locked nucleic acid with phosphorothioate linkage
  modified_base 18: mod_base = OTHER; note = 2'-O-methoxyethyl modified thymine with phosphorothioate linkage
  modified_base 19: mod_base = OTHER; note = 2'-O-methoxyethyl modified nucleotide with phosphorothioate linkage
  modified_base 20: mod_base = OTHER; note = 2'-O-methoxyethyl 5-methylcytosine
  misc_feature 1..5: note = RNA
  misc_feature 6..15: note = DNA
  misc_feature 16..20: note = RNA
gcagaggtggagcgaagtgc

SEQ ID NO: 971 - DNA, 20 bp, synthetic construct
  source 1..20: mol_type = other DNA
  modified_base 1: mod_base = OTHER; note = 2'-O-methoxyethyl modified nucleotide with phosphorothioate linkage
  modified_base 2: mod_base = OTHER; note = 2'-O-methoxyethyl 5-methylcytosine with phosphorothioate linkage
  modified_base 3: mod_base = OTHER; note = 2'-O-methoxyethyl modified nucleotide with phosphorothioate linkage
  modified_base 4: mod_base = OTHER; note = 2'-O-methoxyethyl modified nucleotide with phosphorothioate linkage
  modified_base 5: mod_base = OTHER; note = Locked nucleic acid with phosphorothioate linkage
  modified_base 6: mod_base = OTHER; note = Nucleotide with phosphorothioate linkage
  modified_base 7: mod_base = OTHER; note = Nucleotide with phosphorothioate linkage
  modified_base 8: mod_base = OTHER; note = Thymine with phosphorothioate linkage
  modified_base 9: mod_base = OTHER; note = Nucleotide with phosphorothioate linkage
  modified_base 10: mod_base = OTHER; note = Nucleotide with phosphorothioate linkage
  modified_base 11: mod_base = OTHER; note = Thymine with phosphorothioate linkage
  modified_base 12: mod_base = OTHER; note = Nucleotide with phosphorothioate linkage
  modified_base 13: mod_base = OTHER; note = 5-methylcytosine with phosphorothioate linkage
  modified_base 14: mod_base = OTHER; note = Nucleotide with phosphorothioate linkage
  modified_base 15: mod_base = OTHER; note = Nucleotide with phosphorothioate linkage
  modified_base 16: mod_base = OTHER; note = 2'-O-methoxyethyl modified nucleotide with phosphorothioate linkage
  modified_base 17: mod_base = OTHER; note = 2'-O-methoxyethyl modified nucleotide with phosphorothioate linkage
  modified_base 18: mod_base = OTHER; note = 2'-O-methoxyethyl modified thymine with phosphorothioate linkage
  modified_base 19: mod_base = OTHER; note = 2'-O-methoxyethyl modified nucleotide with phosphorothioate linkage
  modified_base 20: mod_base = OTHER; note = 2'-O-methoxyethyl 5-methylcytosine
  misc_feature 1..5: note = RNA
  misc_feature 6..15: note = DNA
  misc_feature 16..20: note = RNA
gcagaggtgatgcgaagtgc

SEQ ID NO: 972 - DNA, 20 bp, synthetic construct
  source 1..20: mol_type = other DNA
  modified_base 1: mod_base = OTHER; note = 2'-O-methoxyethyl modified nucleotide with phosphorothioate linkage
  modified_base 2: mod_base = OTHER; note = 2'-O-methoxyethyl 5-methylcytosine with phosphorothioate linkage
  modified_base 3: mod_base = OTHER; note = 2'-O-methoxyethyl modified nucleotide with phosphorothioate linkage
  modified_base 4: mod_base = OTHER; note = 2'-O-methoxyethyl modified nucleotide with phosphorothioate linkage
  modified_base 5: mod_base = OTHER; note = 2'-O-methoxyethyl modified nucleotide with phosphorothioate linkage
  modified_base 6: mod_base = OTHER; note = Nucleotide with phosphorothioate linkage
  modified_base 7: mod_base = OTHER; note = Nucleotide with phosphorothioate linkage
  modified_base 8: mod_base = OTHER; note = Thymine with phosphorothioate linkage
  modified_base 9: mod_base = OTHER; note = Nucleotide with phosphorothioate linkage
  modified_base 10: mod_base = OTHER; note = Nucleotide with phosphorothioate linkage
  modified_base 11: mod_base = OTHER; note = Thymine with phosphorothioate linkage
  modified_base 12: mod_base = OTHER; note = Nucleotide with phosphorothioate linkage
  modified_base 13: mod_base = OTHER; note = 5-methylcytosine with phosphorothioate linkage
  modified_base 14: mod_base = OTHER; note = Nucleotide with phosphorothioate linkage
  modified_base 15: mod_base = OTHER; note = Nucleotide with phosphorothioate linkage
  modified_base 16: mod_base = OTHER; note = 2'-O-methoxyethyl modified nucleotide with phosphorothioate linkage
  modified_base 17: mod_base = OTHER; note = Locked nucleic acid with phosphorothioate linkage
  modified_base 18: mod_base = OTHER; note = 2'-O-methoxyethyl modified thymine with phosphorothioate linkage
  modified_base 19: mod_base = OTHER; note = 2'-O-methoxyethyl modified nucleotide with phosphorothioate linkage
  modified_base 20: mod_base = OTHER; note = 2'-O-methoxyethyl 5-methylcytosine
  misc_feature 1..5: note = RNA
  misc_feature 6..15: note = DNA
  misc_feature 16..20: note = RNA
gcagaggtgatgcgaagtgc

SEQ ID NO: 973 - DNA, 20 bp, synthetic construct
  source 1..20: mol_type = other DNA
  modified_base 1: mod_base = OTHER; note = 2'-O-methoxyethyl modified nucleotide with phosphorothioate linkage
  modified_base 2: mod_base = OTHER; note = 2'-O-methoxyethyl 5-methylcytosine with phosphorothioate linkage
  modified_base 3: mod_base = OTHER; note = 2'-O-methoxyethyl modified nucleotide with phosphorothioate linkage
  modified_base 4: mod_base = OTHER; note = 2'-O-methoxyethyl modified nucleotide with phosphorothioate linkage
  modified_base 5: mod_base = OTHER; note = Locked nucleic acid with phosphorothioate linkage
  modified_base 6: mod_base = OTHER; note = Nucleotide with phosphorothioate linkage
  modified_base 7: mod_base = OTHER; note = Nucleotide with phosphorothioate linkage
  modified_base 8: mod_base = OTHER; note = Thymine with phosphorothioate linkage
  modified_base 9: mod_base = OTHER; note = Nucleotide with phosphorothioate linkage
  modified_base 10: mod_base = OTHER; note = Nucleotide with phosphorothioate linkage
  modified_base 11: mod_base = OTHER; note = Nucleotide with phosphorothioate linkage
  modified_base 12: mod_base = OTHER; note = 5-methylcytosine with phosphorothioate linkage
  modified_base 13: mod_base = OTHER; note = 5-methylcytosine with phosphorothioate linkage
  modified_base 14: mod_base = OTHER; note = Nucleotide with phosphorothioate linkage
  modified_base 15: mod_base = OTHER; note = Nucleotide with phosphorothioate linkage
  modified_base 16: mod_base = OTHER; note = 2'-O-methoxyethyl modified nucleotide with phosphorothioate linkage
  modified_base 17: mod_base = OTHER; note = 2'-O-methoxyethyl modified nucleotide with phosphorothioate linkage
  modified_base 18: mod_base = OTHER; note = 2'-O-methoxyethyl modified thymine with phosphorothioate linkage
  modified_base 19: mod_base = OTHER; note = 2'-O-methoxyethyl modified nucleotide with phosphorothioate linkage
  modified_base 20: mod_base = OTHER; note = 2'-O-methoxyethyl 5-methylcytosine
  misc_feature 1..5: note = RNA
  misc_feature 6..15: note = DNA
  misc_feature 16..20: note = RNA
gcagaggtgaaccgaagtgc

SEQ ID NO: 974 - DNA, 20 bp, synthetic construct
  source 1..20: mol_type = other DNA
  modified_base 1: mod_base = OTHER; note = 2'-O-methoxyethyl modified nucleotide with phosphorothioate linkage
  modified_base 2: mod_base = OTHER; note = 2'-O-methoxyethyl 5-methylcytosine with phosphorothioate linkage
  modified_base 3: mod_base = OTHER; note = 2'-O-methoxyethyl modified nucleotide with phosphorothioate linkage
  modified_base 4: mod_base = OTHER; note = 2'-O-methoxyethyl modified nucleotide with phosphorothioate linkage
  modified_base 5: mod_base = OTHER; note = 2'-O-methoxyethyl modified nucleotide with phosphorothioate linkage
  modified_base 6: mod_base = OTHER; note = Nucleotide with phosphorothioate linkage
  modified_base 7: mod_base = OTHER; note = Nucleotide with phosphorothioate linkage
  modified_base 8: mod_base = OTHER; note = Thymine with phosphorothioate linkage
  modified_base 9: mod_base = OTHER; note = Nucleotide with phosphorothioate linkage
  modified_base 10: mod_base = OTHER; note = Nucleotide with phosphorothioate linkage
  modified_base 11: mod_base = OTHER; note = Nucleotide with phosphorothioate linkage
  modified_base 12: mod_base = OTHER; note = 5-methylcytosine with phosphorothioate linkage
  modified_base 13: mod_base = OTHER; note = 5-methylcytosine with phosphorothioate linkage
  modified_base 14: mod_base = OTHER; note = Nucleotide with phosphorothioate linkage
  modified_base 15: mod_base = OTHER; note = Nucleotide with phosphorothioate linkage
  modified_base 16: mod_base = OTHER; note = 2'-O-methoxyethyl modified nucleotide with phosphorothioate linkage
  modified_base 17: mod_base = OTHER; note = Locked nucleic acid with phosphorothioate linkage
  modified_base 18: mod_base = OTHER; note = 2'-O-methoxyethyl modified thymine with phosphorothioate linkage
  modified_base 19: mod_base = OTHER; note = 2'-O-methoxyethyl modified nucleotide with phosphorothioate linkage
  modified_base 20: mod_base = OTHER; note = 2'-O-methoxyethyl 5-methylcytosine
  misc_feature 1..5: note = RNA
  misc_feature 6..15: note = DNA
  misc_feature 16..20: note = RNA
gcagaggtgaaccgaagtgc

SEQ ID NO: 975 - DNA, 20 bp, synthetic construct
  source 1..20: mol_type = other DNA
  modified_base 1: mod_base = OTHER; note = 2'-O-methoxyethyl modified nucleotide with phosphorothioate linkage
  modified_base 2: mod_base = OTHER; note = 2'-O-methoxyethyl 5-methylcytosine with phosphorothioate linkage
  modified_base 3: mod_base = OTHER; note = 2'-O-methoxyethyl modified nucleotide with phosphorothioate linkage
  modified_base 4: mod_base = OTHER; note = 2'-O-methoxyethyl modified nucleotide with phosphorothioate linkage
  modified_base 5: mod_base = OTHER; note = Locked nucleic acid with phosphorothioate linkage
  modified_base 6: mod_base = OTHER; note = Nucleotide with phosphorothioate linkage
  modified_base 7: mod_base = OTHER; note = Nucleotide with phosphorothioate linkage
  modified_base 8: mod_base = OTHER; note = Thymine with phosphorothioate linkage
  modified_base 9: mod_base = OTHER; note = Nucleotide with phosphorothioate linkage
  modified_base 10: mod_base = OTHER; note = Nucleotide with phosphorothioate linkage
  modified_base 11: mod_base = OTHER; note = Nucleotide with phosphorothioate linkage
  modified_base 12: mod_base = OTHER; note = Thymine with phosphorothioate linkage
  modified_base 13: mod_base = OTHER; note = 5-methylcytosine with phosphorothioate linkage
  modified_base 14: mod_base = OTHER; note = Nucleotide with phosphorothioate linkage
  modified_base 15: mod_base = OTHER; note = Nucleotide with phosphorothioate linkage
  modified_base 16: mod_base = OTHER; note = 2'-O-methoxyethyl modified nucleotide with phosphorothioate linkage
  modified_base 17: mod_base = OTHER; note = 2'-O-methoxyethyl modified nucleotide with phosphorothioate linkage
  modified_base 18: mod_base = OTHER; note = 2'-O-methoxyethyl modified thymine with phosphorothioate linkage
  modified_base 19: mod_base = OTHER; note = 2'-O-methoxyethyl modified nucleotide with phosphorothioate linkage
  modified_base 20: mod_base = OTHER; note = 2'-O-methoxyethyl 5-methylcytosine
  misc_feature 1..5: note = RNA
  misc_feature 6..15: note = DNA
  misc_feature 16..20: note = RNA
gcagaggtgaatcgaagtgc

SEQ ID NO: 976 - DNA, 20 bp, synthetic construct
  source 1..20: mol_type = other DNA
  modified_base 1: mod_base = OTHER; note = 2'-O-methoxyethyl modified nucleotide with phosphorothioate linkage
  modified_base 2: mod_base = OTHER; note = 2'-O-methoxyethyl 5-methylcytosine with phosphorothioate linkage
  modified_base 3: mod_base = OTHER; note = 2'-O-methoxyethyl modified nucleotide with phosphorothioate linkage
  modified_base 4: mod_base = OTHER; note = 2'-O-methoxyethyl modified nucleotide with phosphorothioate linkage
  modified_base 5: mod_base = OTHER; note = 2'-O-methoxyethyl modified nucleotide with phosphorothioate linkage
  modified_base 6: mod_base = OTHER; note = Nucleotide with phosphorothioate linkage
  modified_base 7: mod_base = OTHER; note = Nucleotide with phosphorothioate linkage
  modified_base 8: mod_base = OTHER; note = Thymine with phosphorothioate linkage
  modified_base 9: mod_base = OTHER; note = Nucleotide with phosphorothioate linkage
  modified_base 10: mod_base = OTHER; note = Nucleotide with phosphorothioate linkage
  modified_base 11: mod_base = OTHER; note = Nucleotide with phosphorothioate linkage
  modified_base 12: mod_base = OTHER; note = Thymine with phosphorothioate linkage
  modified_base 13: mod_base = OTHER; note = 5-methylcytosine with phosphorothioate linkage
  modified_base 14: mod_base = OTHER; note = Nucleotide with phosphorothioate linkage
  modified_base 15: mod_base = OTHER; note = Nucleotide with phosphorothioate linkage
  modified_base 16: mod_base = OTHER; note = 2'-O-methoxyethyl modified nucleotide with phosphorothioate linkage
  modified_base 17: mod_base = OTHER; note = Locked nucleic acid with phosphorothioate linkage
  modified_base 18: mod_base = OTHER; note = 2'-O-methoxyethyl modified thymine with phosphorothioate linkage
  modified_base 19: mod_base = OTHER; note = 2'-O-methoxyethyl modified nucleotide with phosphorothioate linkage
  modified_base 20: mod_base = OTHER; note = 2'-O-methoxyethyl 5-methylcytosine
  misc_feature 1..5: note = RNA
  misc_feature 6..15: note = DNA
  misc_feature 16..20: note = RNA
gcagaggtgaatcgaagtgc

SEQ ID NO: 977 - DNA, 20 bp, synthetic construct
  source 1..20: mol_type = other DNA
  modified_base 1: mod_base = OTHER; note = 2'-O-methoxyethyl modified nucleotide with phosphorothioate linkage
  modified_base 2: mod_base = OTHER; note = 2'-O-methoxyethyl 5-methylcytosine with phosphorothioate linkage
  modified_base 3: mod_base = OTHER; note = 2'-O-methoxyethyl modified nucleotide with phosphorothioate linkage
  modified_base 4: mod_base = OTHER; note = 2'-O-methoxyethyl modified nucleotide with phosphorothioate linkage
  modified_base 5: mod_base = OTHER; note = Locked nucleic acid with phosphorothioate linkage
  modified_base 6: mod_base = OTHER; note = Nucleotide with phosphorothioate linkage
  modified_base 7: mod_base = OTHER; note = Nucleotide with phosphorothioate linkage
  modified_base 8: mod_base = OTHER; note = Thymine with phosphorothioate linkage
  modified_base 9: mod_base = OTHER; note = Nucleotide with phosphorothioate linkage
  modified_base 10: mod_base = OTHER; note = Nucleotide with phosphorothioate linkage
  modified_base 11: mod_base = OTHER; note = 2'-O-methyl modified abasic nucleotide with phosphorothioate linkage
  modified_base 12: mod_base = OTHER; note = Nucleotide with phosphorothioate linkage
  modified_base 13: mod_base = OTHER; note = 5-methylcytosine with phosphorothioate linkage
  modified_base 14: mod_base = OTHER; note = Nucleotide with phosphorothioate linkage
  modified_base 15: mod_base = OTHER; note = Nucleotide with phosphorothioate linkage
  modified_base 16: mod_base = OTHER; note = 2'-O-methoxyethyl modified nucleotide with phosphorothioate linkage
  modified_base 17: mod_base = OTHER; note = 2'-O-methoxyethyl modified nucleotide with phosphorothioate linkage
  modified_base 18: mod_base = OTHER; note = 2'-O-methoxyethyl modified thymine with phosphorothioate linkage
  modified_base 19: mod_base = OTHER; note = 2'-O-methoxyethyl modified nucleotide with phosphorothioate linkage
  modified_base 20: mod_base = OTHER; note = 2'-O-methoxyethyl 5-methylcytosine
  misc_feature 1..5: note = RNA
  misc_feature 6..10: note = DNA
  misc_feature 11: note = RNA
  misc_feature 12..15: note = DNA
  misc_feature 16..20: note = RNA
gcagaggtgangcgaagtgc

SEQ ID NO: 978 - DNA, 20 bp, synthetic construct
  source 1..20: mol_type = other DNA
  modified_base 1: mod_base = OTHER; note = 2'-O-methoxyethyl modified nucleotide with phosphorothioate linkage
  modified_base 2: mod_base = OTHER; note = 2'-O-methoxyethyl 5-methylcytosine with phosphorothioate linkage
  modified_base 3: mod_base = OTHER; note = 2'-O-methoxyethyl modified nucleotide with phosphorothioate linkage
  modified_base 4: mod_base = OTHER; note = 2'-O-methoxyethyl modified nucleotide with phosphorothioate linkage
  modified_base 5: mod_base = OTHER; note = 2'-O-methoxyethyl modified nucleotide with phosphorothioate linkage
  modified_base 6: mod_base = OTHER; note = Nucleotide with phosphorothioate linkage
  modified_base 7: mod_base = OTHER; note = Nucleotide with phosphorothioate linkage
  modified_base 8: mod_base = OTHER; note = Thymine with phosphorothioate linkage
  modified_base 9: mod_base = OTHER; note = Nucleotide with phosphorothioate linkage
  modified_base 10: mod_base = OTHER; note = Nucleotide with phosphorothioate linkage
  modified_base 11: mod_base = OTHER; note = 2'-O-methyl modified abasic nucleotide with phosphorothioate linkage
  modified_base 12: mod_base = OTHER; note = Nucleotide with phosphorothioate linkage
  modified_base 13: mod_base = OTHER; note = 5-methylcytosine with phosphorothioate linkage
  modified_base 14: mod_base = OTHER; note = Nucleotide with phosphorothioate linkage
  modified_base 15: mod_base = OTHER; note = Nucleotide with phosphorothioate linkage
  modified_base 16: mod_base = OTHER; note = 2'-O-methoxyethyl modified nucleotide with phosphorothioate linkage
  modified_base 17: mod_base = OTHER; note = Locked nucleic acid with phosphorothioate linkage
  modified_base 18: mod_base = OTHER; note = 2'-O-methoxyethyl modified thymine with phosphorothioate linkage
  modified_base 19: mod_base = OTHER; note = 2'-O-methoxyethyl modified nucleotide with phosphorothioate linkage
  modified_base 20: mod_base = OTHER; note = 2'-O-methoxyethyl 5-methylcytosine
  misc_feature 1..5: note = RNA
  misc_feature 6..10: note = DNA
  misc_feature 11: note = RNA
  misc_feature 12..15: note = DNA
  misc_feature 16..20: note = RNA
gcagaggtgangcgaagtgc

SEQ ID NO: 979 - DNA, 20 bp, synthetic construct
  source 1..20: mol_type = other DNA
  modified_base 1: mod_base = OTHER; note = 2'-O-methoxyethyl modified nucleotide with phosphorothioate linkage
  modified_base 2: mod_base = OTHER; note = 2'-O-methoxyethyl 5-methylcytosine with phosphorothioate linkage
  modified_base 3: mod_base = OTHER; note = 2'-O-methoxyethyl modified nucleotide with phosphorothioate linkage
  modified_base 4: mod_base = OTHER; note = 2'-O-methoxyethyl modified nucleotide with phosphorothioate linkage
  modified_base 5: mod_base = OTHER; note = Locked nucleic acid with phosphorothioate linkage
  modified_base 6: mod_base = OTHER; note = Nucleotide with phosphorothioate linkage
  modified_base 7: mod_base = OTHER; note = Nucleotide with phosphorothioate linkage
  modified_base 8: mod_base = OTHER; note = Thymine with phosphorothioate linkage
  modified_base 9: mod_base = OTHER; note = Nucleotide with phosphorothioate linkage
  modified_base 10: mod_base = OTHER; note = Abasic nucleotide with a phosphorothioate linkage
  modified_base 11: mod_base = OTHER; note = Nucleotide with phosphorothioate linkage
  modified_base 12: mod_base = OTHER; note = Nucleotide with phosphorothioate linkage
  modified_base 13: mod_base = OTHER; note = 5-methylcytosine with phosphorothioate linkage
  modified_base 14: mod_base = OTHER; note = Nucleotide with phosphorothioate linkage
  modified_base 15: mod_base = OTHER; note = Nucleotide with phosphorothioate linkage
  modified_base 16: mod_base = OTHER; note = 2'-O-methoxyethyl modified nucleotide with phosphorothioate linkage
  modified_base 17: mod_base = OTHER; note = 2'-O-methoxyethyl modified nucleotide with phosphorothioate linkage
  modified_base 18: mod_base = OTHER; note = 2'-O-methoxyethyl modified thymine with phosphorothioate linkage
  modified_base 19: mod_base = OTHER; note = 2'-O-methoxyethyl modified nucleotide with phosphorothioate linkage
  modified_base 20: mod_base = OTHER; note = 2'-O-methoxyethyl 5-methylcytosine
  misc_feature 1..5: note = RNA
  misc_feature 6..15: note = DNA
  misc_feature 16..20: note = RNA
gcagaggtgnagcgaagtgc

SEQ ID NO: 980 - DNA, 20 bp, synthetic construct
  source 1..20: mol_type = other DNA
  modified_base 1: mod_base = OTHER; note = 2'-O-methoxyethyl modified nucleotide with phosphorothioate linkage
  modified_base 2: mod_base = OTHER; note = 2'-O-methoxyethyl 5-methylcytosine with phosphorothioate linkage
  modified_base 3: mod_base = OTHER; note = 2'-O-methoxyethyl modified nucleotide with phosphorothioate linkage
  modified_base 4: mod_base = OTHER; note = 2'-O-methoxyethyl modified nucleotide with phosphorothioate linkage
  modified_base 5: mod_base = OTHER; note = 2'-O-methoxyethyl modified nucleotide with phosphorothioate linkage
  modified_base 6: mod_base = OTHER; note = Nucleotide with phosphorothioate linkage
  modified_base 7: mod_base = OTHER; note = Nucleotide with phosphorothioate linkage
  modified_base 8: mod_base = OTHER; note = Thymine with phosphorothioate linkage
  modified_base 9: mod_base = OTHER; note = Nucleotide with phosphorothioate linkage
  modified_base 10: mod_base = OTHER; note = Abasic nucleotide with a phosphorothioate linkage
  modified_base 11: mod_base = OTHER; note = Nucleotide with phosphorothioate linkage
  modified_base 12: mod_base = OTHER; note = Nucleotide with phosphorothioate linkage
  modified_base 13: mod_base = OTHER; note = 5-methylcytosine with phosphorothioate linkage
  modified_base 14: mod_base = OTHER; note = Nucleotide with phosphorothioate linkage
  modified_base 15: mod_base = OTHER; note = Nucleotide with phosphorothioate linkage
  modified_base 16: mod_base = OTHER; note = 2'-O-methoxyethyl modified nucleotide with phosphorothioate linkage
  modified_base 17: mod_base = OTHER; note = Locked nucleic acid with phosphorothioate linkage
  modified_base 18: mod_base = OTHER; note = 2'-O-methoxyethyl modified thymine with phosphorothioate linkage
  modified_base 19: mod_base = OTHER; note = 2'-O-methoxyethyl modified nucleotide with phosphorothioate linkage
  modified_base 20: mod_base = OTHER; note = 2'-O-methoxyethyl 5-methylcytosine
  misc_feature 1..5: note = RNA
  misc_feature 6..15: note = DNA
  misc_feature 16..20: note = RNA
gcagaggtgnagcgaagtgc

SEQ ID NO: 981 - DNA, 20 bp, synthetic construct
  source 1..20: mol_type = other DNA
  modified_base 1: mod_base = OTHER; note = 2'-O-methoxyethyl modified nucleotide with phosphorothioate linkage
  modified_base 2: mod_base = OTHER; note = 2'-O-methoxyethyl 5-methylcytosine with phosphorothioate linkage
  modified_base 3: mod_base = OTHER; note = Locked nucleic acid with phosphorothioate linkage
  modified_base 4: mod_base = OTHER; note = 2'-O-methoxyethyl modified nucleotide with phosphorothioate linkage
  modified_base 5: mod_base = OTHER; note = Locked nucleic acid with phosphorothioate linkage
  modified_base 6: mod_base = OTHER; note = Nucleotide with phosphorothioate linkage
  modified_base 7: mod_base = OTHER; note = Nucleotide with phosphorothioate linkage
  modified_base 8: mod_base = OTHER; note = Thymine with phosphorothioate linkage
  modified_base 9: mod_base = OTHER; note = Nucleotide with phosphorothioate linkage
  modified_base 10: mod_base = OTHER; note = Nucleotide with phosphorothioate linkage
  modified_base 11: mod_base = OTHER; note = 2'-O-methyl modified abasic nucleotide with phosphorothioate linkage
  modified_base 12: mod_base = OTHER; note = Nucleotide with phosphorothioate linkage
  modified_base 13: mod_base = OTHER; note = 5-methylcytosine with phosphorothioate linkage
  modified_base 14: mod_base = OTHER; note = Nucleotide with phosphorothioate linkage
  modified_base 15: mod_base = OTHER; note = Nucleotide with phosphorothioate linkage
  modified_base 16: mod_base = OTHER; note = 2'-O-methoxyethyl modified nucleotide with phosphorothioate linkage
  modified_base 17: mod_base = OTHER; note = 2'-O-methoxyethyl modified nucleotide with phosphorothioate linkage
  modified_base 18: mod_base = OTHER; note = 2'-O-methoxyethyl modified thymine with phosphorothioate linkage
  modified_base 19: mod_base = OTHER; note = 2'-O-methoxyethyl modified nucleotide with phosphorothioate linkage
  modified_base 20: mod_base = OTHER; note = 2'-O-methoxyethyl 5-methylcytosine
  misc_feature 1..5: note = RNA
  misc_feature 6..10: note = DNA
  misc_feature 11: note = RNA
  misc_feature 12..15: note = DNA
  misc_feature 16..20: note = RNA
gcagaggtgangcgaagtgc

SEQ ID NO: 982 - DNA, 20 bp, synthetic construct
  source 1..20: mol_type = other DNA
  modified_base 1: mod_base = OTHER; note = 2'-O-methoxyethyl modified nucleotide with phosphorothioate linkage
  modified_base 2: mod_base = OTHER; note = 2'-O-methoxyethyl 5-methylcytosine with phosphorothioate linkage
  modified_base 3: mod_base = OTHER; note = 2'-O-methoxyethyl modified nucleotide with phosphorothioate linkage
  modified_base 4: mod_base = OTHER; note = Locked nucleic acid with phosphorothioate linkage
  modified_base 5: mod_base = OTHER; note = Locked nucleic acid with phosphorothioate linkage
  modified_base 6: mod_base = OTHER; note = Nucleotide with phosphorothioate linkage
  modified_base 7: mod_base = OTHER; note = Nucleotide with phosphorothioate linkage
  modified_base 8: mod_base = OTHER; note = Thymine with phosphorothioate linkage
  modified_base 9: mod_base = OTHER; note = Nucleotide with phosphorothioate linkage
  modified_base 10: mod_base = OTHER; note = Nucleotide with phosphorothioate linkage
  modified_base 11: mod_base = OTHER; note = 2'-O-methyl modified abasic nucleotide with phosphorothioate linkage
  modified_base 12: mod_base = OTHER; note = Nucleotide with phosphorothioate linkage
  modified_base 13: mod_base = OTHER; note = 5-methylcytosine with phosphorothioate linkage
  modified_base 14: mod_base = OTHER; note = Nucleotide with phosphorothioate linkage
  modified_base 15: mod_base = OTHER; note = Nucleotide with phosphorothioate linkage
  modified_base 16: mod_base = OTHER; note = 2'-O-methoxyethyl modified nucleotide with phosphorothioate linkage
  modified_base 17: mod_base = OTHER; note = 2'-O-methoxyethyl modified nucleotide with phosphorothioate linkage
  modified_base 18: mod_base = OTHER; note = 2'-O-methoxyethyl modified thymine with phosphorothioate linkage
  modified_base 19: mod_base = OTHER; note = 2'-O-methoxyethyl modified nucleotide with phosphorothioate linkage
  modified_base 20: mod_base = OTHER; note = 2'-O-methoxyethyl 5-methylcytosine
  misc_feature 1..5: note = RNA
  misc_feature 6..10: note = DNA
  misc_feature 11: note = RNA
  misc_feature 12..15: note = DNA
  misc_feature 16..20: note = RNA
gcagaggtgangcgaagtgc

SEQ ID NO: 983 - DNA, 20 bp, synthetic construct
  source 1..20: mol_type = other DNA
  modified_base 1: mod_base = OTHER; note = 2'-O-methoxyethyl modified nucleotide with phosphorothioate linkage
  modified_base 2: mod_base = OTHER; note = 2'-O-methoxyethyl 5-methylcytosine with phosphorothioate linkage
  modified_base 3: mod_base = OTHER; note = 2'-O-methoxyethyl modified nucleotide with phosphorothioate linkage
  modified_base 4: mod_base = OTHER; note = Locked nucleic acid with phosphorothioate linkage
  modified_base 5: mod_base = OTHER; note = 2'-O-methoxyethyl modified nucleotide with phosphorothioate linkage
  modified_base 6: mod_base = OTHER; note = Nucleotide with phosphorothioate linkage
  modified_base 7: mod_base = OTHER; note = Nucleotide with phosphorothioate linkage
  modified_base 8: mod_base = OTHER; note = Thymine with phosphorothioate linkage
  modified_base 9: mod_base = OTHER; note = Nucleotide with phosphorothioate linkage
  modified_base 10: mod_base = OTHER; note = Nucleotide with phosphorothioate linkage
  modified_base 11: mod_base = OTHER; note = 2'-O-methyl modified abasic nucleotide with phosphorothioate linkage
  modified_base 12: mod_base = OTHER; note = Nucleotide with phosphorothioate linkage
  modified_base 13: mod_base = OTHER; note = 5-methylcytosine with phosphorothioate linkage
  modified_base 14: mod_base = OTHER; note = Nucleotide with phosphorothioate linkage
  modified_base 15: mod_base = OTHER; note = Nucleotide with phosphorothioate linkage
  modified_base 16: mod_base = OTHER; note = Locked nucleic acid with phosphorothioate linkage
  modified_base 17: mod_base = OTHER; note = 2'-O-methoxyethyl modified nucleotide with phosphorothioate linkage
  modified_base 18: mod_base = OTHER; note = 2'-O-methoxyethyl modified thymine with phosphorothioate linkage
  modified_base 19: mod_base = OTHER; note = 2'-O-methoxyethyl modified nucleotide with phosphorothioate linkage
  modified_base 20: mod_base = OTHER; note = 2'-O-methoxyethyl 5-methylcytosine
  misc_feature 1..5: note = RNA
  misc_feature 6..10: note = DNA
  misc_feature 11: note = RNA
  misc_feature 12..15: note = DNA
  misc_feature 16..20: note = RNA
gcagaggtgangcgaagtgc

SEQ ID NO: 984 - DNA, 20 bp, synthetic construct
  source 1..20: mol_type = other DNA
  modified_base 1: mod_base = OTHER; note = 2'-O-methoxyethyl modified nucleotide with phosphorothioate linkage
  modified_base 2: mod_base = OTHER; note = 2'-O-methoxyethyl 5-methylcytosine with phosphorothioate linkage
  modified_base 3: mod_base = OTHER; note = 2'-O-methoxyethyl modified nucleotide with phosphorothioate linkage
  modified_base 4: mod_base = OTHER; note = 2'-O-methoxyethyl modified nucleotide with phosphorothioate linkage
  modified_base 5: mod_base = OTHER; note = Locked nucleic acid with phosphorothioate linkage
  modified_base 6: mod_base = OTHER; note = Nucleotide with phosphorothioate linkage
  modified_base 7: mod_base = OTHER; note = Nucleotide with phosphorothioate linkage
  modified_base 8: mod_base = OTHER; note = Thymine with phosphorothioate linkage
  modified_base 9: mod_base = OTHER; note = Nucleotide with phosphorothioate linkage
  modified_base 10: mod_base = OTHER; note = Nucleotide with phosphorothioate linkage
  modified_base 11: mod_base = OTHER; note = 2'-O-methyl modified abasic nucleotide with phosphorothioate linkage
  modified_base 12: mod_base = OTHER; note = Nucleotide with phosphorothioate linkage
  modified_base 13: mod_base = OTHER; note = 5-methylcytosine with phosphorothioate linkage
  modified_base 14: mod_base = OTHER; note = Nucleotide with phosphorothioate linkage
  modified_base 15: mod_base = OTHER; note = Nucleotide with phosphorothioate linkage
  modified_base 16: mod_base = OTHER; note = Locked nucleic acid with phosphorothioate linkage
  modified_base 17: mod_base = OTHER; note = 2'-O-methoxyethyl modified nucleotide with phosphorothioate linkage
  modified_base 18: mod_base = OTHER; note = 2'-O-methoxyethyl modified thymine with phosphorothioate linkage
  modified_base 19: mod_base = OTHER; note = 2'-O-methoxyethyl modified nucleotide with phosphorothioate linkage
  modified_base 20: mod_base = OTHER; note = 2'-O-methoxyethyl 5-methylcytosine
  misc_feature 1..5: note = RNA
  misc_feature 6..10: note = DNA
  misc_feature 11: note = RNA
  misc_feature 12..15: note = DNA
  misc_feature 16..20: note = RNA
gcagaggtgangcgaagtgc

SEQ ID NO: 985 - DNA, 20 bp, synthetic construct
  source 1..20: mol_type = other DNA
  modified_base 1: mod_base = OTHER; note = 2'-O-methoxyethyl modified nucleotide with phosphorothioate linkage
  modified_base 2: mod_base = OTHER; note = 2'-O-methoxyethyl 5-methylcytosine with phosphorothioate linkage
  modified_base 3: mod_base = OTHER; note = 2'-O-methoxyethyl modified nucleotide with phosphorothioate linkage
  modified_base 4: mod_base = OTHER; note = 2'-O-methoxyethyl modified nucleotide with phosphorothioate linkage
  modified_base 5: mod_base = OTHER; note = Locked nucleic acid with phosphorothioate linkage
  modified_base 6: mod_base = OTHER; note = Nucleotide with phosphorothioate linkage
  modified_base 7: mod_base = OTHER; note = Nucleotide with phosphorothioate linkage
  modified_base 8: mod_base = OTHER; note = Thymine with phosphorothioate linkage
  modified_base 9: mod_base = OTHER; note = Nucleotide with phosphorothioate linkage
  modified_base 10: mod_base = OTHER; note = Nucleotide with phosphorothioate linkage
  modified_base 11: mod_base = OTHER; note = 2'-O-methyl modified abasic nucleotide with phosphorothioate linkage
  modified_base 12: mod_base = OTHER; note = Nucleotide with phosphorothioate linkage
  modified_base 13: mod_base = OTHER; note = 5-methylcytosine with phosphorothioate linkage
  modified_base 14: mod_base = OTHER; note = Nucleotide with phosphorothioate linkage
  modified_base 15: mod_base = OTHER; note = Nucleotide with phosphorothioate linkage
  modified_base 16: mod_base = OTHER; note = 2'-O-methoxyethyl modified nucleotide with phosphorothioate linkage
  modified_base 17: mod_base = OTHER; note = 2'-O-methoxyethyl modified nucleotide with phosphorothioate linkage
  modified_base 18: mod_base = OTHER; note = 2'-O-methoxyethyl modified thymine with phosphorothioate linkage
  modified_base 19: mod_base = OTHER; note = Locked nucleic acid with phosphorothioate linkage
  modified_base 20: mod_base = OTHER; note = 2'-O-methoxyethyl 5-methylcytosine
  misc_feature 1..5: note = RNA
  misc_feature 6..10: note = DNA
  misc_feature 11: note = RNA
  misc_feature 12..15: note = DNA
  misc_feature 16..20: note = RNA
gcagaggtgangcgaagtgc

SEQ ID NO: 986 - DNA, 20 bp, synthetic construct
  source 1..20: mol_type = other DNA
  modified_base 1: mod_base = OTHER; note = 2'-O-methoxyethyl modified nucleotide with phosphorothioate linkage
  modified_base 2: mod_base = OTHER; note = 2'-O-methoxyethyl 5-methylcytosine with phosphorothioate linkage
  modified_base 3: mod_base = OTHER; note = 2'-O-methoxyethyl modified nucleotide with phosphorothioate linkage
  modified_base 4: mod_base = OTHER; note = 2'-O-methoxyethyl modified nucleotide with phosphorothioate linkage
  modified_base 5: mod_base = OTHER; note = 2'-O-methoxyethyl modified nucleotide with phosphorothioate linkage
  modified_base 6: mod_base = OTHER; note = Nucleotide with phosphorothioate linkage
  modified_base 7: mod_base = OTHER; note = Nucleotide with phosphorothioate linkage
  modified_base 8: mod_base = OTHER; note = Thymine with phosphorothioate linkage
  modified_base 9: mod_base = OTHER; note = Nucleotide with phosphorothioate linkage
  modified_base 10: mod_base = OTHER; note = Nucleotide with phosphorothioate linkage
  modified_base 11: mod_base = OTHER; note = 2'-O-methyl modified abasic nucleotide with phosphorothioate linkage
  modified_base 12: mod_base = OTHER; note = Nucleotide with phosphorothioate linkage
  modified_base 13: mod_base = OTHER; note = 5-methylcytosine with phosphorothioate linkage
  modified_base 14: mod_base = OTHER; note = Nucleotide with phosphorothioate linkage
  modified_base 15: mod_base = OTHER; note = Nucleotide with phosphorothioate linkage
  modified_base 16: mod_base = OTHER; note = Locked nucleic acid with phosphorothioate linkage
  modified_base 17: mod_base = OTHER; note = 2'-O-methoxyethyl modified nucleotide with phosphorothioate linkage
  modified_base 18: mod_base = OTHER; note = Locked thymine with phosphorothioate linkage
  modified_base 19: mod_base = OTHER; note = 2'-O-methoxyethyl modified nucleotide with phosphorothioate linkage
  modified_base 20: mod_base = OTHER; note = 2'-O-methoxyethyl 5-methylcytosine
  misc_feature 1..5: note = RNA
  misc_feature 6..10: note = DNA
  misc_feature 11: note = RNA
  misc_feature 12..15: note = DNA
  misc_feature 16..20: note = RNA
gcagaggtgangcgaagtgc

SEQ ID NO: 987 - DNA, 20 bp, synthetic construct
  source 1..20: mol_type = other DNA
  modified_base 1: mod_base = OTHER; note = 2'-O-methoxyethyl modified nucleotide with phosphorothioate linkage
  modified_base 2: mod_base = OTHER; note = 2'-O-methoxyethyl 5-methylcytosine with phosphorothioate linkage
  modified_base 3: mod_base = OTHER; note = Locked nucleic acid with phosphorothioate linkage
  modified_base 4: mod_base = OTHER; note = 2'-O-methoxyethyl modified nucleotide with phosphorothioate linkage
  modified_base 5: mod_base = OTHER; note = Locked nucleic acid with phosphorothioate linkage
  modified_base 6: mod_base = OTHER; note = Nucleotide with phosphorothioate linkage
  modified_base 7: mod_base = OTHER; note = Nucleotide with phosphorothioate linkage
  modified_base 8: mod_base = OTHER; note = Thymine with phosphorothioate linkage
  modified_base 9: mod_base = OTHER; note = Nucleotide with phosphorothioate linkage
  modified_base 10: mod_base = OTHER; note = Nucleotide with phosphorothioate linkage
  modified_base 11: mod_base = OTHER; note = Nucleotide with phosphorothioate linkage
  modified_base 12: mod_base = OTHER; note = Nucleotide with phosphorothioate linkage
  modified_base 13: mod_base = OTHER; note = 5-methylcytosine with phosphorothioate linkage
  modified_base 14: mod_base = OTHER; note = Nucleotide with phosphorothioate linkage
  modified_base 15: mod_base = OTHER; note = Nucleotide with phosphorothioate linkage
  modified_base 16: mod_base = OTHER; note = 2'-O-methoxyethyl modified nucleotide with phosphorothioate linkage
  modified_base 17: mod_base = OTHER; note = 2'-O-methoxyethyl modified nucleotide with phosphorothioate linkage
  modified_base 18: mod_base = OTHER; note = 2'-O-methoxyethyl modified thymine with phosphorothioate linkage
  modified_base 19: mod_base = OTHER; note = 2'-O-methoxyethyl modified nucleotide with phosphorothioate linkage
  modified_base 20: mod_base = OTHER; note = 2'-O-methoxyethyl 5-methylcytosine
  misc_feature 1..5: note = RNA
  misc_feature 6..15: note = DNA
  misc_feature 16..20: note = RNA
gcagaggtggagcgaagtgc

SEQ ID NO: 988 - DNA, 20 bp, synthetic construct
  source 1..20: mol_type = other DNA
  modified_base 1: mod_base = OTHER; note = 2'-O-methoxyethyl modified nucleotide with phosphorothioate linkage
  modified_base 2: mod_base = OTHER; note = 2'-O-methoxyethyl 5-methylcytosine with phosphorothioate linkage
  modified_base 3: mod_base = OTHER; note = 2'-O-methoxyethyl modified nucleotide with phosphorothioate linkage
  modified_base 4: mod_base = OTHER; note = Locked nucleic acid with phosphorothioate linkage
  modified_base 5: mod_base = OTHER; note = Locked nucleic acid with phosphorothioate linkage
  modified_base 6: mod_base = OTHER; note = Nucleotide with phosphorothioate linkage
  modified_base 7: mod_base = OTHER; note = Nucleotide with phosphorothioate linkage
  modified_base 8: mod_base = OTHER; note = Thymine with phosphorothioate linkage
  modified_base 9: mod_base = OTHER; note = Nucleotide with phosphorothioate linkage
  modified_base 10: mod_base = OTHER; note = Nucleotide with phosphorothioate linkage
  modified_base 11: mod_base = OTHER; note = Nucleotide with phosphorothioate linkage
  modified_base 12: mod_base = OTHER; note = Nucleotide with phosphorothioate linkage
  modified_base 13: mod_base = OTHER; note = 5-methylcytosine with phosphorothioate linkage
  modified_base 14: mod_base = OTHER; note = Nucleotide with phosphorothioate linkage
  modified_base 15: mod_base = OTHER; note = Nucleotide with phosphorothioate linkage
  modified_base 16: mod_base = OTHER; note = 2'-O-methoxyethyl modified nucleotide with phosphorothioate linkage
  modified_base 17: mod_base = OTHER; note = 2'-O-methoxyethyl modified nucleotide with phosphorothioate linkage
  modified_base 18: mod_base = OTHER; note = 2'-O-methoxyethyl modified thymine with phosphorothioate linkage
  modified_base 19: mod_base = OTHER; note = 2'-O-methoxyethyl modified nucleotide with phosphorothioate linkage
  modified_base 20: mod_base = OTHER; note = 2'-O-methoxyethyl 5-methylcytosine
  misc_feature 1..5: note = RNA
  misc_feature 6..15: note = DNA
  misc_feature 16..20: note = RNA
gcagaggtggagcgaagtgc

SEQ ID NO: 989 - DNA, 20 bp, synthetic construct
  source 1..20: mol_type = other DNA
  modified_base 1: mod_base = OTHER; note = 2'-O-methoxyethyl modified nucleotide with phosphorothioate linkage
  modified_base 2: mod_base = OTHER; note = 2'-O-methoxyethyl 5-methylcytosine with phosphorothioate linkage
  modified_base 3: mod_base = OTHER; note = 2'-O-methoxyethyl modified nucleotide with phosphorothioate linkage
  modified_base 4: mod_base = OTHER; note = Locked nucleic acid with phosphorothioate linkage
  modified_base 5: mod_base = OTHER; note = 2'-O-methoxyethyl modified nucleotide with phosphorothioate linkage
  modified_base 6: mod_base = OTHER; note = Nucleotide with phosphorothioate linkage
  modified_base 7: mod_base = OTHER; note = Nucleotide with phosphorothioate linkage
  modified_base 8: mod_base = OTHER; note = Thymine with phosphorothioate linkage
  modified_base 9: mod_base = OTHER; note = Nucleotide with phosphorothioate linkage
  modified_base 10: mod_base = OTHER; note = Nucleotide with phosphorothioate linkage
  modified_base 11: mod_base = OTHER; note = Nucleotide with phosphorothioate linkage
  modified_base 12: mod_base = OTHER; note = Nucleotide with phosphorothioate linkage
  modified_base 13: mod_base = OTHER; note = 5-methylcytosine with phosphorothioate linkage
  modified_base 14: mod_base = OTHER; note = Nucleotide with phosphorothioate linkage
  modified_base 15: mod_base = OTHER; note = Nucleotide with phosphorothioate linkage
  modified_base 16: mod_base = OTHER; note = Locked nucleic acid with phosphorothioate linkage
  modified_base 17: mod_base = OTHER; note = 2'-O-methoxyethyl modified nucleotide with phosphorothioate linkage
  modified_base 18: mod_base = OTHER; note = 2'-O-methoxyethyl modified thymine with phosphorothioate linkage
  modified_base 19: mod_base = OTHER; note = 2'-O-methoxyethyl modified nucleotide with phosphorothioate linkage
  modified_base 20: mod_base = OTHER; note = 2'-O-methoxyethyl 5-methylcytosine
  misc_feature 1..5: note = RNA
  misc_feature 6..15: note = DNA
  misc_feature 16..20: note = RNA
gcagaggtggagcgaagtgc

SEQ ID NO: 990 - DNA, 20 bp, synthetic construct
  source 1..20: mol_type = other DNA
  modified_base 1: mod_base = OTHER; note = 2'-O-methoxyethyl modified nucleotide with phosphorothioate linkage
  modified_base 2: mod_base = OTHER; note = 2'-O-methoxyethyl 5-methylcytosine with phosphorothioate linkage
  modified_base 3: mod_base = OTHER; note = 2'-O-methoxyethyl modified nucleotide with phosphorothioate linkage
  modified_base 4: mod_base = OTHER; note = 2'-O-methoxyethyl modified nucleotide with phosphorothioate linkage
  modified_base 5: mod_base = OTHER; note = Locked nucleic acid with phosphorothioate linkage
  modified_base 6: mod_base = OTHER; note = Nucleotide with phosphorothioate linkage
  modified_base 7: mod_base = OTHER; note = Nucleotide with phosphorothioate linkage
  modified_base 8: mod_base = OTHER; note = Thymine with phosphorothioate linkage
  modified_base 9: mod_base = OTHER; note = Nucleotide with phosphorothioate linkage
  modified_base 10: mod_base = OTHER; note = Nucleotide with phosphorothioate linkage
  modified_base 11: mod_base = OTHER; note = Nucleotide with phosphorothioate linkage
  modified_base 12: mod_base = OTHER; note = Nucleotide with phosphorothioate linkage
  modified_base 13: mod_base = OTHER; note = 5-methylcytosine with phosphorothioate linkage
  modified_base 14: mod_base = OTHER; note = Nucleotide with phosphorothioate linkage
  modified_base 15: mod_base = OTHER; note = Nucleotide with phosphorothioate linkage
  modified_base 16: mod_base = OTHER; note = Locked nucleic acid with phosphorothioate linkage
  modified_base 17: mod_base = OTHER; note = 2'-O-methoxyethyl modified nucleotide with phosphorothioate linkage
  modified_base 18: mod_base = OTHER; note = 2'-O-methoxyethyl modified thymine with phosphorothioate linkage
  modified_base 19: mod_base = OTHER; note = 2'-O-methoxyethyl modified nucleotide with phosphorothioate linkage
  modified_base 20: mod_base = OTHER; note = 2'-O-methoxyethyl 5-methylcytosine
  misc_feature 1..5: note = RNA
  misc_feature 6..15: note = DNA
  misc_feature 16..20: note = RNA
gcagaggtggagcgaagtgc

SEQ ID NO: 991 - DNA, 20 bp, synthetic construct
  source 1..20: mol_type = other DNA
  modified_base 1: mod_base = OTHER; note = 2'-O-methoxyethyl modified nucleotide with phosphorothioate linkage
  modified_base 2: mod_base = OTHER; note = 2'-O-methoxyethyl 5-methylcytosine with phosphorothioate linkage
  modified_base 3: mod_base = OTHER; note = 2'-O-methoxyethyl modified nucleotide with phosphorothioate linkage
  modified_base 4: mod_base = OTHER; note = 2'-O-methoxyethyl modified nucleotide with phosphorothioate linkage
  modified_base 5: mod_base = OTHER; note = Locked nucleic acid with phosphorothioate linkage
  modified_base 6: mod_base = OTHER; note = Nucleotide with phosphorothioate linkage
  modified_base 7: mod_base = OTHER; note = Nucleotide with phosphorothioate linkage
  modified_base 8: mod_base = OTHER; note = Thymine with phosphorothioate linkage
  modified_base 9: mod_base = OTHER; note = Nucleotide with phosphorothioate linkage
  modified_base 10: mod_base = OTHER; note = Nucleotide with phosphorothioate linkage
  modified_base 11: mod_base = OTHER; note = Nucleotide with phosphorothioate linkage
  modified_base 12: mod_base = OTHER; note = Nucleotide with phosphorothioate linkage
  modified_base 13: mod_base = OTHER; note = 5-methylcytosine with phosphorothioate linkage
  modified_base 14: mod_base = OTHER; note = Nucleotide with phosphorothioate linkage
  modified_base 15: mod_base = OTHER; note = Nucleotide with phosphorothioate linkage
  modified_base 16: mod_base = OTHER; note = 2'-O-methoxyethyl modified nucleotide with phosphorothioate linkage
  modified_base 17: mod_base = OTHER; note = 2'-O-methoxyethyl modified nucleotide with phosphorothioate linkage
  modified_base 18: mod_base = OTHER; note = 2'-O-methoxyethyl modified thymine with phosphorothioate linkage
  modified_base 19: mod_base = OTHER; note = Locked nucleic acid with phosphorothioate linkage
  modified_base 20: mod_base = OTHER; note = 2'-O-methoxyethyl 5-methylcytosine
  misc_feature 1..5: note = RNA
  misc_feature 6..15: note = DNA
  misc_feature 16..20: note = RNA
gcagaggtggagcgaagtgc

SEQ ID NO: 992 - DNA, 20 bp, synthetic construct
  source 1..20: mol_type = other DNA
  modified_base 1: mod_base = OTHER; note = 2'-O-methoxyethyl modified nucleotide with phosphorothioate linkage
  modified_base 2: mod_base = OTHER; note = 2'-O-methoxyethyl 5-methylcytosine with phosphorothioate linkage
  modified_base 3: mod_base = OTHER; note = 2'-O-methoxyethyl modified nucleotide with phosphorothioate linkage
  modified_base 4: mod_base = OTHER; note = 2'-O-methoxyethyl modified nucleotide with phosphorothioate linkage
  modified_base 5: mod_base = OTHER; note = 2'-O-methoxyethyl modified nucleotide with phosphorothioate linkage
  modified_base 6: mod_base = OTHER; note = Nucleotide with phosphorothioate linkage
  modified_base 7: mod_base = OTHER; note = Nucleotide with phosphorothioate linkage
  modified_base 8: mod_base = OTHER; note = Thymine with phosphorothioate linkage
  modified_base 9: mod_base = OTHER; note = Nucleotide with phosphorothioate linkage
  modified_base 10: mod_base = OTHER; note = Nucleotide with phosphorothioate linkage
  modified_base 11: mod_base = OTHER; note = Nucleotide with phosphorothioate linkage
  modified_base 12: mod_base = OTHER; note = Nucleotide with phosphorothioate linkage
  modified_base 13: mod_base = OTHER; note = 5-methylcytosine with phosphorothioate linkage
  modified_base 14: mod_base = OTHER; note = Nucleotide with phosphorothioate linkage
  modified_base 15: mod_base = OTHER; note = Nucleotide with phosphorothioate linkage
  modified_base 16: mod_base = OTHER; note = Locked nucleic acid with phosphorothioate linkage
  modified_base 17: mod_base = OTHER; note = 2'-O-methoxyethyl modified nucleotide with phosphorothioate linkage
  modified_base 18: mod_base = OTHER; note = Locked thymine with phosphorothioate linkage
  modified_base 19: mod_base = OTHER; note = 2'-O-methoxyethyl modified nucleotide with phosphorothioate linkage
  modified_base 20: mod_base = OTHER; note = 2'-O-methoxyethyl 5-methylcytosine
  misc_feature 1..5: note = RNA
  misc_feature 6..15: note = DNA
  misc_feature 16..20: note = RNA
gcagaggtggagcgaagtgc

SEQ ID NO: 993 - DNA, 20 bp, synthetic construct
  source 1..20: mol_type = other DNA
  modified_base 1: mod_base = OTHER; note = 2'-O-methoxyethyl modified nucleotide with phosphorothioate linkage
  modified_base 2: mod_base = OTHER; note = 2'-O-methoxyethyl 5-methylcytosine with phosphorothioate linkage
  modified_base 3: mod_base = OTHER; note = Locked nucleic acid with phosphorothioate linkage
  modified_base 4: mod_base = OTHER; note = 2'-O-methoxyethyl modified nucleotide with phosphorothioate linkage
  modified_base 5: mod_base = OTHER; note = Locked nucleic acid with phosphorothioate linkage
  modified_base 6: mod_base = OTHER; note = Nucleotide with phosphorothioate linkage
  modified_base 7: mod_base = OTHER; note = Nucleotide with phosphorothioate linkage
  modified_base 8: mod_base = OTHER; note = Thymine with phosphorothioate linkage
  modified_base 9: mod_base = OTHER; note = 5-methylcytosine with phosphorothioate linkage
  modified_base 10: mod_base = OTHER; note = Nucleotide with phosphorothioate linkage
  modified_base 11: mod_base = OTHER; note = Nucleotide with phosphorothioate linkage
  modified_base 12: mod_base = OTHER; note = Nucleotide with phosphorothioate linkage
  modified_base 13: mod_base = OTHER; note = 5-methylcytosine with phosphorothioate linkage
  modified_base 14: mod_base = OTHER; note = Nucleotide with phosphorothioate linkage
  modified_base 15: mod_base = OTHER; note = Nucleotide with phosphorothioate linkage
  modified_base 16: mod_base = OTHER; note = 2'-O-methoxyethyl modified nucleotide with phosphorothioate linkage
  modified_base 17: mod_base = OTHER; note = 2'-O-methoxyethyl modified nucleotide with phosphorothioate linkage
  modified_base 18: mod_base = OTHER; note = 2'-O-methoxyethyl modified thymine with phosphorothioate linkage
  modified_base 19: mod_base = OTHER; note = 2'-O-methoxyethyl modified nucleotide with phosphorothioate linkage
  modified_base 20: mod_base = OTHER; note = 2'-O-methoxyethyl 5-methylcytosine
  misc_feature 1..5: note = RNA
  misc_feature 6..15: note = DNA
  misc_feature 16..20: note = RNA
gcagaggtcaagcgaagtgc

SEQ ID NO: 994 - DNA, 20 bp, synthetic construct
  source 1..20: mol_type = other DNA
  modified_base 1: mod_base = OTHER; note = 2'-O-methoxyethyl modified nucleotide with phosphorothioate linkage
  modified_base 2: mod_base = OTHER; note = 2'-O-methoxyethyl 5-methylcytosine with phosphorothioate linkage
  modified_base 3: mod_base = OTHER; note = 2'-O-methoxyethyl modified nucleotide with phosphorothioate linkage
  modified_base 4: mod_base = OTHER; note = Locked nucleic acid with phosphorothioate linkage
  modified_base 5: mod_base = OTHER; note = Locked nucleic acid with phosphorothioate linkage
  modified_base 6: mod_base = OTHER; note = Nucleotide with phosphorothioate linkage
  modified_base 7: mod_base = OTHER; note = Nucleotide with phosphorothioate linkage
  modified_base 8: mod_base = OTHER; note = Thymine with phosphorothioate linkage
  modified_base 9: mod_base = OTHER; note = 5-methylcytosine with phosphorothioate linkage
  modified_base 10: mod_base = OTHER; note = Nucleotide with phosphorothioate linkage
  modified_base 11: mod_base = OTHER; note = Nucleotide with phosphorothioate linkage
  modified_base 12: mod_base = OTHER; note = Nucleotide with phosphorothioate linkage
  modified_base 13: mod_base = OTHER; note = 5-methylcytosine with phosphorothioate linkage
  modified_base 14: mod_base = OTHER; note = Nucleotide with phosphorothioate linkage
  modified_base 15: mod_base = OTHER; note = Nucleotide with phosphorothioate linkage
  modified_base 16: mod_base = OTHER; note = 2'-O-methoxyethyl modified nucleotide with phosphorothioate linkage
  modified_base 17: mod_base = OTHER; note = 2'-O-methoxyethyl modified nucleotide with phosphorothioate linkage
  modified_base 18: mod_base = OTHER; note = 2'-O-methoxyethyl modified thymine with phosphorothioate linkage
  modified_base 19: mod_base = OTHER; note = 2'-O-methoxyethyl modified nucleotide with phosphorothioate linkage
  modified_base 20: mod_base = OTHER; note = 2'-O-methoxyethyl 5-methylcytosine
  misc_feature 1..5: note = RNA
  misc_feature 6..15: note = DNA
  misc_feature 16..20: note = RNA
gcagaggtcaagcgaagtgc

SEQ ID NO: 995 - DNA, 20 bp, synthetic construct
  source 1..20: mol_type = other DNA
  modified_base 1: mod_base = OTHER; note = 2'-O-methoxyethyl modified nucleotide with phosphorothioate linkage
  modified_base 2: mod_base = OTHER; note = 2'-O-methoxyethyl 5-methylcytosine with phosphorothioate linkage
  modified_base 3: mod_base = OTHER; note = 2'-O-methoxyethyl modified nucleotide with phosphorothioate linkage
  modified_base 4: mod_base = OTHER; note = Locked nucleic acid with phosphorothioate linkage
  modified_base 5: mod_base = OTHER; note = 2'-O-methoxyethyl modified nucleotide with phosphorothioate linkage
  modified_base 6: mod_base = OTHER; note = Nucleotide with phosphorothioate linkage
  modified_base 7: mod_base = OTHER; note = Nucleotide with phosphorothioate linkage
  modified_base 8: mod_base = OTHER; note = Thymine with phosphorothioate linkage
  modified_base 9: mod_base = OTHER; note = 5-methylcytosine with phosphorothioate linkage
  modified_base 10: mod_base = OTHER; note = Nucleotide with phosphorothioate linkage
  modified_base 11: mod_base = OTHER; note = Nucleotide with phosphorothioate linkage
  modified_base 12: mod_base = OTHER; note = Nucleotide with phosphorothioate linkage
  modified_base 13: mod_base = OTHER; note = 5-methylcytosine with phosphorothioate linkage
  modified_base 14: mod_base = OTHER; note = Nucleotide with phosphorothioate linkage
  modified_base 15: mod_base = OTHER; note = Nucleotide with phosphorothioate linkage
  modified_base 16: mod_base = OTHER; note = Locked nucleic acid with phosphorothioate linkage
  modified_base 17: mod_base = OTHER; note = 2'-O-methoxyethyl modified nucleotide with phosphorothioate linkage
  modified_base 18: mod_base = OTHER; note = 2'-O-methoxyethyl modified thymine with phosphorothioate linkage
  modified_base 19: mod_base = OTHER; note = 2'-O-methoxyethyl modified nucleotide with phosphorothioate linkage
  modified_base 20: mod_base = OTHER; note = 2'-O-methoxyethyl 5-methylcytosine
  misc_feature 1..5: note = RNA
  misc_feature 6..15: note = DNA
  misc_feature 16..20: note = RNA
gcagaggtcaagcgaagtgc

SEQ ID NO: 996 - DNA, 20 bp, synthetic construct
  source 1..20: mol_type = other DNA
  modified_base 1: mod_base = OTHER; note = 2'-O-methoxyethyl modified nucleotide with phosphorothioate linkage
  modified_base 2: mod_base = OTHER; note = 2'-O-methoxyethyl 5-methylcytosine with phosphorothioate linkage
  modified_base 3: mod_base = OTHER; note = 2'-O-methoxyethyl modified nucleotide with phosphorothioate linkage
  modified_base 4: mod_base = OTHER; note = 2'-O-methoxyethyl modified nucleotide with phosphorothioate linkage
  modified_base 5: mod_base = OTHER; note = Locked nucleic acid with phosphorothioate linkage
  modified_base 6: mod_base = OTHER; note = Nucleotide with phosphorothioate linkage
  modified_base 7: mod_base = OTHER; note = Nucleotide with phosphorothioate linkage
  modified_base 8: mod_base = OTHER; note = Thymine with phosphorothioate linkage
  modified_base 9: mod_base = OTHER; note = 5-methylcytosine with phosphorothioate linkage
  modified_base 10: mod_base = OTHER; note = Nucleotide with phosphorothioate linkage
  modified_base 11: mod_base = OTHER; note = Nucleotide with phosphorothioate linkage
  modified_base 12: mod_base = OTHER; note = Nucleotide with phosphorothioate linkage
  modified_base 13: mod_base = OTHER; note = 5-methylcytosine with phosphorothioate linkage
  modified_base 14: mod_base = OTHER; note = Nucleotide with phosphorothioate linkage
  modified_base 15: mod_base = OTHER; note = Nucleotide with phosphorothioate linkage
  modified_base 16: mod_base = OTHER; note = Locked nucleic acid with phosphorothioate linkage
  modified_base 17: mod_base = OTHER; note = 2'-O-methoxyethyl modified nucleotide with phosphorothioate linkage
  modified_base 18: mod_base = OTHER; note = 2'-O-methoxyethyl modified thymine with phosphorothioate linkage
  modified_base 19: mod_base = OTHER; note = 2'-O-methoxyethyl modified nucleotide with phosphorothioate linkage
  modified_base 20: mod_base = OTHER; note = 2'-O-methoxyethyl 5-methylcytosine
  misc_feature 1..5: note = RNA
  misc_feature 6..15: note = DNA
  misc_feature 16..20: note = RNA
gcagaggtcaagcgaagtgc

SEQ ID NO: 997 - DNA, 20 bp, synthetic construct
  source 1..20: mol_type = other DNA
  modified_base 1: mod_base = OTHER; note = 2'-O-methoxyethyl modified nucleotide with phosphorothioate linkage
  modified_base 2: mod_base = OTHER; note = 2'-O-methoxyethyl 5-methylcytosine with phosphorothioate linkage
  modified_base 3: mod_base = OTHER; note = 2'-O-methoxyethyl modified nucleotide with phosphorothioate linkage
  modified_base 4: mod_base = OTHER; note = 2'-O-methoxyethyl modified nucleotide with phosphorothioate linkage
  modified_base 5: mod_base = OTHER; note = Locked nucleic acid with phosphorothioate linkage
  modified_base 6: mod_base = OTHER; note = Nucleotide with phosphorothioate linkage
  modified_base 7: mod_base = OTHER; note = Nucleotide with phosphorothioate linkage
  modified_base 8: mod_base = OTHER; note = Thymine with phosphorothioate linkage
  modified_base 9: mod_base = OTHER; note = 5-methylcytosine with phosphorothioate linkage
  modified_base 10: mod_base = OTHER; note = Nucleotide with phosphorothioate linkage
  modified_base 11: mod_base = OTHER; note = Nucleotide with phosphorothioate linkage
  modified_base 12: mod_base = OTHER; note = Nucleotide with phosphorothioate linkage
  modified_base 13: mod_base = OTHER; note = 5-methylcytosine with phosphorothioate linkage
  modified_base 14: mod_base = OTHER; note = Nucleotide with phosphorothioate linkage
  modified_base 15: mod_base = OTHER; note = Nucleotide with phosphorothioate linkage
  modified_base 16: mod_base = OTHER; note = 2'-O-methoxyethyl modified nucleotide with phosphorothioate linkage
  modified_base 17: mod_base = OTHER; note = 2'-O-methoxyethyl modified nucleotide with phosphorothioate linkage
  modified_base 18: mod_base = OTHER; note = 2'-O-methoxyethyl modified thymine with phosphorothioate linkage
  modified_base 19: mod_base = OTHER; note = Locked nucleic acid with phosphorothioate linkage
  modified_base 20: mod_base = OTHER; note = 2'-O-methoxyethyl 5-methylcytosine
  misc_feature 1..5: note = RNA
  misc_feature 6..15: note = DNA
  misc_feature 16..20: note = RNA
gcagaggtcaagcgaagtgc

SEQ ID NO: 998 - DNA, 20 bp, synthetic construct
  source 1..20: mol_type = other DNA
  modified_base 1: mod_base = OTHER; note = 2'-O-methoxyethyl modified nucleotide with phosphorothioate linkage
  modified_base 2: mod_base = OTHER; note = 2'-O-methoxyethyl 5-methylcytosine with phosphorothioate linkage
  modified_base 3: mod_base = OTHER; note = 2'-O-methoxyethyl modified nucleotide with phosphorothioate linkage
  modified_base 4: mod_base = OTHER; note = 2'-O-methoxyethyl modified nucleotide with phosphorothioate linkage
  modified_base 5: mod_base = OTHER; note = 2'-O-methoxyethyl modified nucleotide with phosphorothioate linkage
  modified_base 6: mod_base = OTHER; note = Nucleotide with phosphorothioate linkage
  modified_base 7: mod_base = OTHER; note = Nucleotide with phosphorothioate linkage
  modified_base 8: mod_base = OTHER; note = Thymine with phosphorothioate linkage
  modified_base 9: mod_base = OTHER; note = 5-methylcytosine with phosphorothioate linkage
  modified_base 10: mod_base = OTHER; note = Nucleotide with phosphorothioate linkage
  modified_base 11: mod_base = OTHER; note = Nucleotide with phosphorothioate linkage
  modified_base 12: mod_base = OTHER; note = Nucleotide with phosphorothioate linkage
  modified_base 13: mod_base = OTHER; note = 5-methylcytosine with phosphorothioate linkage
  modified_base 14: mod_base = OTHER; note = Nucleotide with phosphorothioate linkage
  modified_base 15: mod_base = OTHER; note = Nucleotide with phosphorothioate linkage
  modified_base 16: mod_base = OTHER; note = Locked nucleic acid with phosphorothioate linkage
  modified_base 17: mod_base = OTHER; note = 2'-O-methoxyethyl modified nucleotide with phosphorothioate linkage
  modified_base 18: mod_base = OTHER; note = Locked thymine with phosphorothioate linkage
  modified_base 19: mod_base = OTHER; note = 2'-O-methoxyethyl modified nucleotide with phosphorothioate linkage
  modified_base 20: mod_base = OTHER; note = 2'-O-methoxyethyl 5-methylcytosine
  misc_feature 1..5: note = RNA
  misc_feature 6..15: note = DNA
  misc_feature 16..20: note = RNA
gcagaggtcaagcgaagtgc

SEQ ID NO: 999 - DNA, 20 bp, synthetic construct
  source 1..20: mol_type = other DNA
  modified_base 1: mod_base = OTHER; note = 2'-O-methoxyethyl modified nucleotide with phosphorothioate linkage
  modified_base 2: mod_base = OTHER; note = 2'-O-methoxyethyl 5-methylcytosine with phosphorothioate linkage
  modified_base 3: mod_base = OTHER; note = Locked nucleic acid with phosphorothioate linkage
  modified_base 4: mod_base = OTHER; note = 2'-O-methoxyethyl modified nucleotide with phosphorothioate linkage
  modified_base 5: mod_base = OTHER; note = Locked nucleic acid with phosphorothioate linkage
  modified_base 6: mod_base = OTHER; note = Nucleotide with phosphorothioate linkage
  modified_base 7: mod_base = OTHER; note = Nucleotide with phosphorothioate linkage
  modified_base 8: mod_base = OTHER; note = Thymine with phosphorothioate linkage
  modified_base 9: mod_base = OTHER; note = Nucleotide with phosphorothioate linkage
  modified_base 10: mod_base = OTHER; note = Nucleotide with phosphorothioate linkage
  modified_base 11: mod_base = OTHER; note = Thymine with phosphorothioate linkage
  modified_base 12: mod_base = OTHER; note = Nucleotide with phosphorothioate linkage
  modified_base 13: mod_base = OTHER; note = 5-methylcytosine with phosphorothioate linkage
  modified_base 14: mod_base = OTHER; note = Nucleotide with phosphorothioate linkage
  modified_base 15: mod_base = OTHER; note = Nucleotide with phosphorothioate linkage
  modified_base 16: mod_base = OTHER; note = 2'-O-methoxyethyl modified nucleotide with phosphorothioate linkage
  modified_base 17: mod_base = OTHER; note = 2'-O-methoxyethyl modified nucleotide with phosphorothioate linkage
  modified_base 18: mod_base = OTHER; note = 2'-O-methoxyethyl modified thymine with phosphorothioate linkage
  modified_base 19: mod_base = OTHER; note = 2'-O-methoxyethyl modified nucleotide with phosphorothioate linkage
  modified_base 20: mod_base = OTHER; note = 2'-O-methoxyethyl 5-methylcytosine
  misc_feature 1..5: note = RNA
  misc_feature 6..15: note = DNA
  misc_feature 16..20: note = RNA
gcagaggtgatgcgaagtgc

SEQ ID NO: 1000 - DNA, 20 bp, synthetic construct
  source 1..20: mol_type = other DNA
  modified_base 1: mod_base = OTHER; note = 2'-O-methoxyethyl modified nucleotide with phosphorothioate linkage
  modified_base 2: mod_base = OTHER; note = 2'-O-methoxyethyl 5-methylcytosine with phosphorothioate linkage
  modified_base 3: mod_base = OTHER; note = 2'-O-methoxyethyl modified nucleotide with phosphorothioate linkage
  modified_base 4: mod_base = OTHER; note = Locked nucleic acid with phosphorothioate linkage
  modified_base 5: mod_base = OTHER; note = Locked nucleic acid with phosphorothioate linkage
  modified_base 6: mod_base = OTHER; note = Nucleotide with phosphorothioate linkage
  modified_base 7: mod_base = OTHER; note = Nucleotide with phosphorothioate linkage
  modified_base 8: mod_base = OTHER; note = Thymine with phosphorothioate linkage
  modified_base 9: mod_base = OTHER; note = Nucleotide with phosphorothioate linkage
  modified_base 10: mod_base = OTHER; note = Nucleotide with phosphorothioate linkage
  modified_base 11: mod_base = OTHER; note = Thymine with phosphorothioate linkage
  modified_base 12: mod_base = OTHER; note = Nucleotide with phosphorothioate linkage
  modified_base 13: mod_base = OTHER; note = 5-methylcytosine with phosphorothioate linkage
  modified_base 14: mod_base = OTHER; note = Nucleotide with phosphorothioate linkage
  modified_base 15: mod_base = OTHER; note = Nucleotide with phosphorothioate linkage
  modified_base 16: mod_base = OTHER; note = 2'-O-methoxyethyl modified nucleotide with phosphorothioate linkage
  modified_base 17: mod_base = OTHER; note = 2'-O-methoxyethyl modified nucleotide with phosphorothioate linkage
  modified_base 18: mod_base = OTHER; note = 2'-O-methoxyethyl modified thymine with phosphorothioate linkage
  modified_base 19: mod_base = OTHER; note = 2'-O-methoxyethyl modified nucleotide with phosphorothioate linkage
  modified_base 20: mod_base = OTHER; note = 2'-O-methoxyethyl 5-methylcytosine
  misc_feature 1..5: note = RNA
  misc_feature 6..15: note = DNA
  misc_feature 16..20: note = RNA
gcagaggtgatgcgaagtgc

SEQ ID NO: 1001 - DNA, 20 bp, synthetic construct
  source 1..20: mol_type = other DNA
  modified_base 1: mod_base = OTHER; note = 2'-O-methoxyethyl modified nucleotide with phosphorothioate linkage
  modified_base 2: mod_base = OTHER; note = 2'-O-methoxyethyl 5-methylcytosine with phosphorothioate linkage
  modified_base 3: mod_base = OTHER; note = 2'-O-methoxyethyl modified nucleotide with phosphorothioate linkage
  modified_base 4: mod_base = OTHER; note = Locked nucleic acid with phosphorothioate linkage
  modified_base 5: mod_base = OTHER; note = 2'-O-methoxyethyl modified nucleotide with phosphorothioate linkage
  modified_base 6: mod_base = OTHER; note = Nucleotide with phosphorothioate linkage
  modified_base 7: mod_base = OTHER; note = Nucleotide with phosphorothioate linkage
  modified_base 8: mod_base = OTHER; note = Thymine with phosphorothioate linkage
  modified_base 9: mod_base = OTHER; note = Nucleotide with phosphorothioate linkage
  modified_base 10: mod_base = OTHER; note = Nucleotide with phosphorothioate linkage
  modified_base 11: mod_base = OTHER; note = Thymine with phosphorothioate linkage
  modified_base 12: mod_base = OTHER; note = Nucleotide with phosphorothioate linkage
  modified_base 13: mod_base = OTHER; note = 5-methylcytosine with phosphorothioate linkage
  modified_base 14: mod_base = OTHER; note = Nucleotide with phosphorothioate linkage
  modified_base 15: mod_base = OTHER; note = Nucleotide with phosphorothioate linkage
  modified_base 16: mod_base = OTHER; note = Locked nucleic acid with phosphorothioate linkage
  modified_base 17: mod_base = OTHER; note = 2'-O-methoxyethyl modified nucleotide with phosphorothioate linkage
  modified_base 18: mod_base = OTHER; note = 2'-O-methoxyethyl modified thymine with phosphorothioate linkage
  modified_base 19: mod_base = OTHER; note = 2'-O-methoxyethyl modified nucleotide with phosphorothioate linkage
  modified_base 20: mod_base = OTHER; note = 2'-O-methoxyethyl 5-methylcytosine
  misc_feature 1..5: note = RNA
  misc_feature 6..15: note = DNA
  misc_feature 16..20: note = RNA
gcagaggtgatgcgaagtgc

SEQ ID NO: 1002 - DNA, 20 bp, synthetic construct
  source 1..20: mol_type = other DNA
  modified_base 1: mod_base = OTHER; note = 2'-O-methoxyethyl modified nucleotide with phosphorothioate linkage
  modified_base 2: mod_base = OTHER; note = 2'-O-methoxyethyl 5-methylcytosine with phosphorothioate linkage
  modified_base 3: mod_base = OTHER; note = 2'-O-methoxyethyl modified nucleotide with phosphorothioate linkage
  modified_base 4: mod_base = OTHER; note = 2'-O-methoxyethyl modified nucleotide with phosphorothioate linkage
  modified_base 5: mod_base = OTHER; note = Locked nucleic acid with phosphorothioate linkage
  modified_base 6: mod_base = OTHER; note = Nucleotide with phosphorothioate linkage
  modified_base 7: mod_base = OTHER; note = Nucleotide with phosphorothioate linkage
  modified_base 8: mod_base = OTHER; note = Thymine with phosphorothioate linkage
  modified_base 9: mod_base = OTHER; note = Nucleotide with phosphorothioate linkage
  modified_base 10: mod_base = OTHER; note = Nucleotide with phosphorothioate linkage
  modified_base 11: mod_base = OTHER; note = Thymine with phosphorothioate linkage
  modified_base 12: mod_base = OTHER; note = Nucleotide with phosphorothioate linkage
  modified_base 13: mod_base = OTHER; note = 5-methylcytosine with phosphorothioate linkage
  modified_base 14: mod_base = OTHER; note = Nucleotide with phosphorothioate linkage
  modified_base 15: mod_base = OTHER; note = Nucleotide with phosphorothioate linkage
  modified_base 16: mod_base = OTHER; note = Locked nucleic acid with phosphorothioate linkage
  modified_base 17: mod_base = OTHER; note = 2'-O-methoxyethyl modified nucleotide with phosphorothioate linkage
  modified_base 18: mod_base = OTHER; note = 2'-O-methoxyethyl modified thymine with phosphorothioate linkage
  modified_base 19: mod_base = OTHER; note = 2'-O-methoxyethyl modified nucleotide with phosphorothioate linkage
  modified_base 20: mod_base = OTHER; note = 2'-O-methoxyethyl 5-methylcytosine
  misc_feature 1..5: note = RNA
  misc_feature 6..15: note = DNA
  misc_feature 16..20: note = RNA
gcagaggtgatgcgaagtgc

SEQ ID NO: 1003 - DNA, 20 bp, synthetic construct
  source 1..20: mol_type = other DNA
  modified_base 1: mod_base = OTHER; note = 2'-O-methoxyethyl modified nucleotide with phosphorothioate linkage
  modified_base 2: mod_base = OTHER; note = 2'-O-methoxyethyl 5-methylcytosine with phosphorothioate linkage
  modified_base 3: mod_base = OTHER; note = 2'-O-methoxyethyl modified nucleotide with phosphorothioate linkage
  modified_base 4: mod_base = OTHER; note = 2'-O-methoxyethyl modified nucleotide with phosphorothioate linkage
  modified_base 5: mod_base = OTHER; note = Locked nucleic acid with phosphorothioate linkage
  modified_base 6: mod_base = OTHER; note = Nucleotide with phosphorothioate linkage
  modified_base 7: mod_base = OTHER; note = Nucleotide with phosphorothioate linkage
  modified_base 8: mod_base = OTHER; note = Thymine with phosphorothioate linkage
  modified_base 9: mod_base = OTHER; note = Nucleotide with phosphorothioate linkage
  modified_base 10: mod_base = OTHER; note = Nucleotide with phosphorothioate linkage
  modified_base 11: mod_base = OTHER; note = Thymine with phosphorothioate linkage
  modified_base 12: mod_base = OTHER; note = Nucleotide with phosphorothioate linkage
  modified_base 13: mod_base = OTHER; note = 5-methylcytosine with phosphorothioate linkage
  modified_base 14: mod_base = OTHER; note = Nucleotide with phosphorothioate linkage
  modified_base 15: mod_base = OTHER; note = Nucleotide with phosphorothioate linkage
  modified_base 16: mod_base = OTHER; note = 2'-O-methoxyethyl modified nucleotide with phosphorothioate linkage
  modified_base 17: mod_base = OTHER; note = 2'-O-methoxyethyl modified nucleotide with phosphorothioate linkage
  modified_base 18: mod_base = OTHER; note = 2'-O-methoxyethyl modified thymine with phosphorothioate linkage
  modified_base 19: mod_base = OTHER; note = Locked nucleic acid with phosphorothioate linkage
  modified_base 20: mod_base = OTHER; note = 2'-O-methoxyethyl 5-methylcytosine
  misc_feature 1..5: note = RNA
  misc_feature 6..15: note = DNA
  misc_feature 16..20: note = RNA
gcagaggtgatgcgaagtgc

SEQ ID NO: 1004 - DNA, 20 bp, synthetic construct
  source 1..20: mol_type = other DNA
  modified_base 1: mod_base = OTHER; note = 2'-O-methoxyethyl modified nucleotide with phosphorothioate linkage
  modified_base 2: mod_base = OTHER; note = 2'-O-methoxyethyl 5-methylcytosine with phosphorothioate linkage
  modified_base 3: mod_base = OTHER; note = 2'-O-methoxyethyl modified nucleotide with phosphorothioate linkage
  modified_base 4: mod_base = OTHER; note = 2'-O-methoxyethyl modified nucleotide with phosphorothioate linkage
  modified_base 5: mod_base = OTHER; note = 2'-O-methoxyethyl modified nucleotide with phosphorothioate linkage
  modified_base 6: mod_base = OTHER; note = Nucleotide with phosphorothioate linkage
  modified_base 7: mod_base = OTHER; note = Nucleotide with phosphorothioate linkage
  modified_base 8: mod_base = OTHER; note = Thymine with phosphorothioate linkage
  modified_base 9: mod_base = OTHER; note = Nucleotide with phosphorothioate linkage
  modified_base 10: mod_base = OTHER; note = Nucleotide with phosphorothioate linkage
  modified_base 11: mod_base = OTHER; note = Thymine with phosphorothioate linkage
  modified_base 12: mod_base = OTHER; note = Nucleotide with phosphorothioate linkage
  modified_base 13: mod_base = OTHER; note = 5-methylcytosine with phosphorothioate linkage
  modified_base 14: mod_base = OTHER; note = Nucleotide with phosphorothioate linkage
  modified_base 15: mod_base = OTHER; note = Nucleotide with phosphorothioate linkage
  modified_base 16: mod_base = OTHER; note = Locked nucleic acid with phosphorothioate linkage
  modified_base 17: mod_base = OTHER; note = 2'-O-methoxyethyl modified nucleotide with phosphorothioate linkage
  modified_base 18: mod_base = OTHER; note = Locked thymine with phosphorothioate linkage
  modified_base 19: mod_base = OTHER; note = 2'-O-methoxyethyl modified nucleotide with phosphorothioate linkage
  modified_base 20: mod_base = OTHER; note = 2'-O-methoxyethyl 5-methylcytosine
  misc_feature 1..5: note = RNA
  misc_feature 6..15: note = DNA
  misc_feature 16..20: note = RNA
gcagaggtgatgcgaagtgc

SEQ ID NO: 1005 - DNA, 20 bp, synthetic construct
  source 1..20: mol_type = other DNA
  modified_base 1: mod_base = OTHER; note = 2'-O-methoxyethyl modified nucleotide with phosphorothioate linkage
  modified_base 2: mod_base = OTHER; note = 2'-O-methoxyethyl 5-methylcytosine with phosphorothioate linkage
  modified_base 3: mod_base = OTHER; note = Locked nucleic acid with phosphorothioate linkage
  modified_base 4: mod_base = OTHER; note = 2'-O-methoxyethyl modified nucleotide with phosphorothioate linkage
  modified_base 5: mod_base = OTHER; note = Locked nucleic acid with phosphorothioate linkage
  modified_base 6: mod_base = OTHER; note = Nucleotide with phosphorothioate linkage
  modified_base 7: mod_base = OTHER; note = Nucleotide with phosphorothioate linkage
  modified_base 8: mod_base = OTHER; note = Thymine with phosphorothioate linkage
  modified_base 9: mod_base = OTHER; note = Nucleotide with phosphorothioate linkage
  modified_base 10: mod_base = OTHER; note = Abasic nucleotide with a phosphorothioate linkage
  modified_base 11: mod_base = OTHER; note = Nucleotide with phosphorothioate linkage
  modified_base 12: mod_base = OTHER; note = Nucleotide with phosphorothioate linkage
  modified_base 13: mod_base = OTHER; note = 5-methylcytosine with phosphorothioate linkage
  modified_base 14: mod_base = OTHER; note = Nucleotide with phosphorothioate linkage
  modified_base 15: mod_base = OTHER; note = Nucleotide with phosphorothioate linkage
  modified_base 16: mod_base = OTHER; note = 2'-O-methoxyethyl modified nucleotide with phosphorothioate linkage
  modified_base 17: mod_base = OTHER; note = 2'-O-methoxyethyl modified nucleotide with phosphorothioate linkage
  modified_base 18: mod_base = OTHER; note = 2'-O-methoxyethyl modified thymine with phosphorothioate linkage
  modified_base 19: mod_base = OTHER; note = 2'-O-methoxyethyl modified nucleotide with phosphorothioate linkage
  modified_base 20: mod_base = OTHER; note = 2'-O-methoxyethyl 5-methylcytosine
  misc_feature 1..5: note = RNA
  misc_feature 6..15: note = DNA
  misc_feature 16..20: note = RNA
gcagaggtgnagcgaagtgc

SEQ ID NO: 1006 - DNA, 20 bp, synthetic construct
  source 1..20: mol_type = other DNA
  modified_base 1: mod_base = OTHER; note = 2'-O-methoxyethyl modified nucleotide with phosphorothioate linkage
  modified_base 2: mod_base = OTHER; note = 2'-O-methoxyethyl 5-methylcytosine with phosphorothioate linkage
  modified_base 3: mod_base = OTHER; note = 2'-O-methoxyethyl modified nucleotide with phosphorothioate linkage
  modified_base 4: mod_base = OTHER; note = Locked nucleic acid with phosphorothioate linkage
  modified_base 5: mod_base = OTHER; note = Locked nucleic acid with phosphorothioate linkage
  modified_base 6: mod_base = OTHER; note = Nucleotide with phosphorothioate linkage
  modified_base 7: mod_base = OTHER; note = Nucleotide with phosphorothioate linkage
  modified_base 8: mod_base = OTHER; note = Thymine with phosphorothioate linkage
  modified_base 9: mod_base = OTHER; note = Nucleotide with phosphorothioate linkage
  modified_base 10: mod_base = OTHER; note = Abasic nucleotide with a phosphorothioate linkage
  modified_base 11: mod_base = OTHER; note = Nucleotide with phosphorothioate linkage
  modified_base 12: mod_base = OTHER; note = Nucleotide with phosphorothioate linkage
  modified_base 13: mod_base = OTHER; note = 5-methylcytosine with phosphorothioate linkage
  modified_base 14: mod_base = OTHER; note = Nucleotide with phosphorothioate linkage
  modified_base 15: mod_base = OTHER; note = Nucleotide with phosphorothioate linkage
  modified_base 16: mod_base = OTHER; note = 2'-O-methoxyethyl modified nucleotide with phosphorothioate linkage
  modified_base 17: mod_base = OTHER; note = 2'-O-methoxyethyl modified nucleotide with phosphorothioate linkage
  modified_base 18: mod_base = OTHER; note = 2'-O-methoxyethyl modified thymine with phosphorothioate linkage
  modified_base 19: mod_base = OTHER; note = 2'-O-methoxyethyl modified nucleotide with phosphorothioate linkage
  modified_base 20: mod_base = OTHER; note = 2'-O-methoxyethyl 5-methylcytosine
  misc_feature 1..5: note = RNA
  misc_feature 6..15: note = DNA
  misc_feature 16..20: note = RNA
gcagaggtgnagcgaagtgc

SEQ ID NO: 1007 - DNA, 20 bp, synthetic construct
  source 1..20: mol_type = other DNA
  modified_base 1: mod_base = OTHER; note = 2'-O-methoxyethyl modified nucleotide with phosphorothioate linkage
  modified_base 2: mod_base = OTHER; note = 2'-O-methoxyethyl 5-methylcytosine with phosphorothioate linkage
  modified_base 3: mod_base = OTHER; note = 2'-O-methoxyethyl modified nucleotide with phosphorothioate linkage
  modified_base 4: mod_base = OTHER; note = Locked nucleic acid with phosphorothioate linkage
  modified_base 5: mod_base = OTHER; note = 2'-O-methoxyethyl modified nucleotide with phosphorothioate linkage
  modified_base 6: mod_base = OTHER; note = Nucleotide with phosphorothioate linkage
  modified_base 7: mod_base = OTHER; note = Nucleotide with phosphorothioate linkage
  modified_base 8: mod_base = OTHER; note = Thymine with phosphorothioate linkage
  modified_base 9: mod_base = OTHER; note = Nucleotide with phosphorothioate linkage
  modified_base 10: mod_base = OTHER; note = Abasic nucleotide with a phosphorothioate linkage
  modified_base 11: mod_base = OTHER; note = Nucleotide with phosphorothioate linkage
  modified_base 12: mod_base = OTHER; note = Nucleotide with phosphorothioate linkage
  modified_base 13: mod_base = OTHER; note = 5-methylcytosine with phosphorothioate linkage
  modified_base 14: mod_base = OTHER; note = Nucleotide with phosphorothioate linkage
  modified_base 15: mod_base = OTHER; note = Nucleotide with phosphorothioate linkage
  modified_base 16: mod_base = OTHER; note = Locked nucleic acid with phosphorothioate linkage
  modified_base 17: mod_base = OTHER; note = 2'-O-methoxyethyl modified nucleotide with phosphorothioate linkage
  modified_base 18: mod_base = OTHER; note = 2'-O-methoxyethyl modified thymine with phosphorothioate linkage
  modified_base 19: mod_base = OTHER; note = 2'-O-methoxyethyl modified nucleotide with phosphorothioate linkage
  modified_base 20: mod_base = OTHER; note = 2'-O-methoxyethyl 5-methylcytosine
  misc_feature 1..5: note = RNA
  misc_feature 6..15: note = DNA
  misc_feature 16..20: note = RNA
gcagaggtgnagcgaagtgc

SEQ ID NO: 1008 - DNA, 20 bp, synthetic construct
  source 1..20: mol_type = other DNA
  modified_base 1: mod_base = OTHER; note = 2'-O-methoxyethyl modified nucleotide with phosphorothioate linkage
  modified_base 2: mod_base = OTHER; note = 2'-O-methoxyethyl 5-methylcytosine with phosphorothioate linkage
  modified_base 3: mod_base = OTHER; note = 2'-O-methoxyethyl modified nucleotide with phosphorothioate linkage
  modified_base 4: mod_base = OTHER; note = 2'-O-methoxyethyl modified nucleotide with phosphorothioate linkage
  modified_base 5: mod_base = OTHER; note = Locked nucleic acid with phosphorothioate linkage
  modified_base 6: mod_base = OTHER; note = Nucleotide with phosphorothioate linkage
  modified_base 7: mod_base = OTHER; note = Nucleotide with phosphorothioate linkage
  modified_base 8: mod_base = OTHER; note = Thymine with phosphorothioate linkage
  modified_base 9: mod_base = OTHER; note = Nucleotide with phosphorothioate linkage
  modified_base 10: mod_base = OTHER; note = Abasic nucleotide with a phosphorothioate linkage
  modified_base 11: mod_base = OTHER; note = Nucleotide with phosphorothioate linkage
  modified_base 12: mod_base = OTHER; note = Nucleotide with phosphorothioate linkage
  modified_base 13: mod_base = OTHER; note = 5-methylcytosine with phosphorothioate linkage
  modified_base 14: mod_base = OTHER; note = Nucleotide with phosphorothioate linkage
  modified_base 15: mod_base = OTHER; note = Nucleotide with phosphorothioate linkage
  modified_base 16: mod_base = OTHER; note = Locked nucleic acid with phosphorothioate linkage
  modified_base 17: mod_base = OTHER; note = 2'-O-methoxyethyl modified nucleotide with phosphorothioate linkage
  modified_base 18: mod_base = OTHER; note = 2'-O-methoxyethyl modified thymine with phosphorothioate linkage
  modified_base 19: mod_base = OTHER; note = 2'-O-methoxyethyl modified nucleotide with phosphorothioate linkage
  modified_base 20: mod_base = OTHER; note = 2'-O-methoxyethyl 5-methylcytosine
  misc_feature 1..5: note = RNA
  misc_feature 6..15: note = DNA
  misc_feature 16..20: note = RNA
gcagaggtgnagcgaagtgc

SEQ ID NO: 1009 - DNA, 20 bp, synthetic construct
  source 1..20: mol_type = other DNA
  modified_base 1: mod_base = OTHER; note = 2'-O-methoxyethyl modified nucleotide with phosphorothioate linkage
  modified_base 2: mod_base = OTHER; note = 2'-O-methoxyethyl 5-methylcytosine with phosphorothioate linkage
  modified_base 3: mod_base = OTHER; note = 2'-O-methoxyethyl modified nucleotide with phosphorothioate linkage
  modified_base 4: mod_base = OTHER; note = 2'-O-methoxyethyl modified nucleotide with phosphorothioate linkage
  modified_base 5: mod_base = OTHER; note = Locked nucleic acid with phosphorothioate linkage
  modified_base 6: mod_base = OTHER; note = Nucleotide with phosphorothioate linkage
  modified_base 7: mod_base = OTHER; note = Nucleotide with phosphorothioate linkage
  modified_base 8: mod_base = OTHER; note = Thymine with phosphorothioate linkage
  modified_base 9: mod_base = OTHER; note = Nucleotide with phosphorothioate linkage
  modified_base 10: mod_base = OTHER; note = Abasic nucleotide with a phosphorothioate linkage
  modified_base 11: mod_base = OTHER; note = Nucleotide with phosphorothioate linkage
  modified_base 12: mod_base = OTHER; note = Nucleotide with phosphorothioate linkage
  modified_base 13: mod_base = OTHER; note = 5-methylcytosine with phosphorothioate linkage
  modified_base 14: mod_base = OTHER; note = Nucleotide with phosphorothioate linkage
  modified_base 15: mod_base = OTHER; note = Nucleotide with phosphorothioate linkage
  modified_base 16: mod_base = OTHER; note = 2'-O-methoxyethyl modified nucleotide with phosphorothioate linkage
  modified_base 17: mod_base = OTHER; note = 2'-O-methoxyethyl modified nucleotide with phosphorothioate linkage
  modified_base 18: mod_base = OTHER; note = 2'-O-methoxyethyl modified thymine with phosphorothioate linkage
  modified_base 19: mod_base = OTHER; note = Locked nucleic acid with phosphorothioate linkage
  modified_base 20: mod_base = OTHER; note = 2'-O-methoxyethyl 5-methylcytosine
  misc_feature 1..5: note = RNA
  misc_feature 6..15: note = DNA
  misc_feature 16..20: note = RNA
gcagaggtgnagcgaagtgc

SEQ ID NO: 1010 - DNA, 20 bp, synthetic construct
  source 1..20: mol_type = other DNA
  modified_base 1: mod_base = OTHER; note = 2'-O-methoxyethyl modified nucleotide with phosphorothioate linkage
  modified_base 2: mod_base = OTHER; note = 2'-O-methoxyethyl 5-methylcytosine with phosphorothioate linkage
  modified_base 3: mod_base = OTHER; note = 2'-O-methoxyethyl modified nucleotide with phosphorothioate linkage
  modified_base 4: mod_base = OTHER; note = 2'-O-methoxyethyl modified nucleotide with phosphorothioate linkage
  modified_base 5: mod_base = OTHER; note = 2'-O-methoxyethyl modified nucleotide with phosphorothioate linkage
  modified_base 6: mod_base = OTHER; note = Nucleotide with phosphorothioate linkage
  modified_base 7: mod_base = OTHER; note = Nucleotide with phosphorothioate linkage
  modified_base 8: mod_base = OTHER; note = Thymine with phosphorothioate linkage
  modified_base 9: mod_base = OTHER; note = Nucleotide with phosphorothioate linkage
  modified_base 10: mod_base = OTHER; note = Abasic nucleotide with a phosphorothioate linkage
  modified_base 11: mod_base = OTHER; note = Nucleotide with phosphorothioate linkage
  modified_base 12: mod_base = OTHER; note = Nucleotide with phosphorothioate linkage
  modified_base 13: mod_base = OTHER; note = 5-methylcytosine with phosphorothioate linkage
  modified_base 14: mod_base = OTHER; note = Nucleotide with phosphorothioate linkage
  modified_base 15: mod_base = OTHER; note = Nucleotide with phosphorothioate linkage
  modified_base 16: mod_base = OTHER; note = Locked nucleic acid with phosphorothioate linkage
  modified_base 17: mod_base = OTHER; note = 2'-O-methoxyethyl modified nucleotide with phosphorothioate linkage
  modified_base 18: mod_base = OTHER; note = Locked thymine with phosphorothioate linkage
  modified_base 19: mod_base = OTHER; note = 2'-O-methoxyethyl modified nucleotide with phosphorothioate linkage
  modified_base 20: mod_base = OTHER; note = 2'-O-methoxyethyl 5-methylcytosine
  misc_feature 1..5: note = RNA
  misc_feature 6..15: note = DNA
  misc_feature 16..20: note = RNA
gcagaggtgnagcgaagtgc

SEQ ID NO: 1011 - DNA, 20 bp, synthetic construct
  source 1..20: mol_type = other DNA
  modified_base 1: mod_base = OTHER; note = 2'-O-methoxyethyl 5-methylcytosine with phosphorothioate linkage
  modified_base 2: mod_base = OTHER; note = 2'-O-methoxyethyl modified nucleotide with phosphorothioate linkage
  modified_base 3: mod_base = OTHER; note = 2'-O-methoxyethyl modified nucleotide with phosphorothioate linkage
  modified_base 4: mod_base = OTHER; note = 2'-O-methoxyethyl modified nucleotide with phosphorothioate linkage
  modified_base 5: mod_base = OTHER; note = 2'-O-methoxyethyl modified nucleotide with phosphorothioate linkage
  modified_base 6: mod_base = OTHER; note = 2'-O-methyl modified abasic nucleotide with phosphorothioate linkage
  modified_base 7: mod_base = OTHER; note = Thymine with phosphorothioate linkage
  modified_base 8: mod_base = OTHER; note = Nucleotide with phosphorothioate linkage
  modified_base 9: mod_base = OTHER; note = Nucleotide with phosphorothioate linkage
  modified_base 10: mod_base = OTHER; note = Nucleotide with phosphorothioate linkage
  modified_base 11: mod_base = OTHER; note = Nucleotide with phosphorothioate linkage
  modified_base 12: mod_base = OTHER; note = 5-methylcytosine with phosphorothioate linkage
  modified_base 13: mod_base = OTHER; note = Nucleotide with phosphorothioate linkage
  modified_base 14: mod_base = OTHER; note = Nucleotide with phosphorothioate linkage
  modified_base 15: mod_base = OTHER; note = Nucleotide with phosphorothioate linkage
  modified_base 16: mod_base = OTHER; note = Locked nucleic acid with phosphorothioate linkage
  modified_base 17: mod_base = OTHER; note = 2'-O-methoxyethyl modified thymine with phosphorothioate linkage
  modified_base 18: mod_base = OTHER; note = Locked nucleic acid with phosphorothioate linkage
  modified_base 19: mod_base = OTHER; note = 2'-O-methoxyethyl 5-methylcytosine with phosphorothioate linkage
  modified_base 20: mod_base = OTHER; note = Locked nucleic acid
  misc_feature 1..6: note = RNA
  misc_feature 7..15: note = DNA
  misc_feature 16..20: note = RNA
cagagntgaagcgaagtgca

SEQ ID NO: 1012 - DNA, 20 bp, synthetic construct
  source 1..20: mol_type = other DNA
  modified_base 1: mod_base = OTHER; note = 2'-O-methoxyethyl 5-methylcytosine with phosphorothioate linkage
  modified_base 2: mod_base = OTHER; note = 2'-O-methoxyethyl modified nucleotide with phosphorothioate linkage
  modified_base 3: mod_base = OTHER; note = 2'-O-methoxyethyl modified nucleotide with phosphorothioate linkage
  modified_base 4: mod_base = OTHER; note = 2'-O-methoxyethyl modified nucleotide with phosphorothioate linkage
  modified_base 5: mod_base = OTHER; note = 2'-O-methoxyethyl modified nucleotide with phosphorothioate linkage
  modified_base 6: mod_base = OTHER; note = Nucleotide with phosphorothioate linkage
  modified_base 7: mod_base = OTHER; note = 2'-O-methyl modified abasic nucleotide with phosphorothioate linkage
  modified_base 8: mod_base = OTHER; note = Nucleotide with phosphorothioate linkage
  modified_base 9: mod_base = OTHER; note = Nucleotide with phosphorothioate linkage
  modified_base 10: mod_base = OTHER; note = Nucleotide with phosphorothioate linkage
  modified_base 11: mod_base = OTHER; note = Nucleotide with phosphorothioate linkage
  modified_base 12: mod_base = OTHER; note = 5-methylcytosine with phosphorothioate linkage
  modified_base 13: mod_base = OTHER; note = Nucleotide with phosphorothioate linkage
  modified_base 14: mod_base = OTHER; note = Nucleotide with phosphorothioate linkage
  modified_base 15: mod_base = OTHER; note = Nucleotide with phosphorothioate linkage
  modified_base 16: mod_base = OTHER; note = Locked nucleic acid with phosphorothioate linkage
  modified_base 17: mod_base = OTHER; note = 2'-O-methoxyethyl modified thymine with phosphorothioate linkage
  modified_base 18: mod_base = OTHER; note = Locked nucleic acid with phosphorothioate linkage
  modified_base 19: mod_base = OTHER; note = 2'-O-methoxyethyl 5-methylcytosine with phosphorothioate linkage
  modified_base 20: mod_base = OTHER; note = Locked nucleic acid
  misc_feature 1..5: note = RNA
  misc_feature 6: note = DNA
  misc_feature 7: note = RNA
  misc_feature 8..15: note = DNA
  misc_feature 16..20: note = RNA
cagaggngaagcgaagtgca

SEQ ID NO: 1013 - DNA, 20 bp, synthetic construct
  source 1..20: mol_type = other DNA
  modified_base 1: mod_base = OTHER; note = 2'-O-methoxyethyl 5-methylcytosine with phosphorothioate linkage
  modified_base 2: mod_base = OTHER; note = 2'-O-methoxyethyl modified nucleotide with phosphorothioate linkage
  modified_base 3: mod_base = OTHER; note = 2'-O-methoxyethyl modified nucleotide with phosphorothioate linkage
  modified_base 4: mod_base = OTHER; note = 2'-O-methoxyethyl modified nucleotide with phosphorothioate linkage
  modified_base 5: mod_base = OTHER; note = 2'-O-methoxyethyl modified nucleotide with phosphorothioate linkage
  modified_base 6: mod_base = OTHER; note = Nucleotide with phosphorothioate linkage
  modified_base 7: mod_base = OTHER; note = Thymine with phosphorothioate linkage
  modified_base 8: mod_base = OTHER; note = 2'-O-methyl modified abasic nucleotide with phosphorothioate linkage
  modified_base 9: mod_base = OTHER; note = Nucleotide with phosphorothioate linkage
  modified_base 10: mod_base = OTHER; note = Nucleotide with phosphorothioate linkage
  modified_base 11: mod_base = OTHER; note = Nucleotide with phosphorothioate linkage
  modified_base 12: mod_base = OTHER; note = 5-methylcytosine with phosphorothioate linkage
  modified_base 13: mod_base = OTHER; note = Nucleotide with phosphorothioate linkage
  modified_base 14: mod_base = OTHER; note = Nucleotide with phosphorothioate linkage
  modified_base 15: mod_base = OTHER; note = Nucleotide with phosphorothioate linkage
  modified_base 16: mod_base = OTHER; note = Locked nucleic acid with phosphorothioate linkage
  modified_base 17: mod_base = OTHER; note = 2'-O-methoxyethyl modified thymine with phosphorothioate linkage
  modified_base 18: mod_base = OTHER; note = Locked nucleic acid with phosphorothioate linkage
  modified_base 19: mod_base = OTHER; note = 2'-O-methoxyethyl 5-methylcytosine with phosphorothioate linkage
  modified_base 20: mod_base = OTHER; note = Locked nucleic acid
  misc_feature 1..5: note = RNA
  misc_feature 6..7: note = DNA
  misc_feature 8: note = RNA
  misc_feature 9..15: note = DNA
  misc_feature 16..20: note = RNA
cagaggtnaagcgaagtgca

SEQ ID NO: 1014 - DNA, 20 bp, synthetic construct
  source 1..20: mol_type = other DNA
  modified_base 1: mod_base = OTHER; note = 2'-O-methoxyethyl 5-methylcytosine with phosphorothioate linkage
  modified_base 2: mod_base = OTHER; note = 2'-O-methoxyethyl modified nucleotide with phosphorothioate linkage
  modified_base 3: mod_base = OTHER; note = 2'-O-methoxyethyl modified nucleotide with phosphorothioate linkage
  modified_base 4: mod_base = OTHER; note = 2'-O-methoxyethyl modified nucleotide with phosphorothioate linkage
  modified_base 5: mod_base = OTHER; note = 2'-O-methoxyethyl modified nucleotide with phosphorothioate linkage
  modified_base 6: mod_base = OTHER; note = Nucleotide with phosphorothioate linkage
  modified_base 7: mod_base = OTHER; note = Thymine with phosphorothioate linkage
  modified_base 8: mod_base = OTHER; note = Nucleotide with phosphorothioate linkage
  modified_base 9: mod_base = OTHER; note = 2'-O-methyl modified abasic nucleotide with phosphorothioate linkage
  modified_base 10: mod_base = OTHER; note = Nucleotide with phosphorothioate linkage
  modified_base 11: mod_base = OTHER; note = Nucleotide with phosphorothioate linkage
  modified_base 12: mod_base = OTHER; note = 5-methylcytosine with phosphorothioate linkage
  modified_base 13: mod_base = OTHER; note = Nucleotide with phosphorothioate linkage
  modified_base 14: mod_base = OTHER; note = Nucleotide with phosphorothioate linkage
  modified_base 15: mod_base = OTHER; note = Nucleotide with phosphorothioate linkage
  modified_base 16: mod_base = OTHER; note = Locked nucleic acid with phosphorothioate linkage
  modified_base 17: mod_base = OTHER; note = 2'-O-methoxyethyl modified thymine with phosphorothioate linkage
  modified_base 18: mod_base = OTHER; note = Locked nucleic acid with phosphorothioate linkage
  modified_base 19: mod_base = OTHER; note = 2'-O-methoxyethyl 5-methylcytosine with phosphorothioate linkage
  modified_base 20: mod_base = OTHER; note = Locked nucleic acid
  misc_feature 1..5: note = RNA
  misc_feature 6..8: note = DNA
  misc_feature 9: note = RNA
  misc_feature 10..15: note = DNA
  misc_feature 16..20: note = RNA
cagaggtgnagcgaagtgca

SEQ ID NO: 1015 - DNA, 20 bp, synthetic construct
  source 1..20: mol_type = other DNA
  modified_base 1: mod_base = OTHER; note = 2'-O-methoxyethyl 5-methylcytosine with phosphorothioate linkage
  modified_base 2: mod_base = OTHER; note = 2'-O-methoxyethyl modified nucleotide with phosphorothioate linkage
  modified_base 3: mod_base = OTHER; note = 2'-O-methoxyethyl modified nucleotide with phosphorothioate linkage
  modified_base 4: mod_base = OTHER; note = 2'-O-methoxyethyl modified nucleotide with phosphorothioate linkage
  modified_base 5: mod_base = OTHER; note = 2'-O-methoxyethyl modified nucleotide with phosphorothioate linkage
  modified_base 6: mod_base = OTHER; note = Nucleotide with phosphorothioate linkage
  modified_base 7: mod_base = OTHER; note = Thymine with phosphorothioate linkage
  modified_base 8: mod_base = OTHER; note = Nucleotide with phosphorothioate linkage
  modified_base 9: mod_base = OTHER; note = Nucleotide with phosphorothioate linkage
  modified_base 10: mod_base = OTHER; note = 2'-O-methyl modified abasic nucleotide with phosphorothioate linkage
  modified_base 11: mod_base = OTHER; note = Nucleotide with phosphorothioate linkage
  modified_base 12: mod_base = OTHER; note = 5-methylcytosine with phosphorothioate linkage
  modified_base 13: mod_base = OTHER; note = Nucleotide with phosphorothioate linkage
  modified_base 14: mod_base = OTHER; note = Nucleotide with phosphorothioate linkage
  modified_base 15: mod_base = OTHER; note = Nucleotide with phosphorothioate linkage
  modified_base 16: mod_base = OTHER; note = Locked nucleic acid with phosphorothioate linkage
  modified_base 17: mod_base = OTHER; note = 2'-O-methoxyethyl modified thymine with phosphorothioate linkage
  modified_base 18: mod_base = OTHER; note = Locked nucleic acid with phosphorothioate linkage
  modified_base 19: mod_base = OTHER; note = 2'-O-methoxyethyl 5-methylcytosine with phosphorothioate linkage
  modified_base 20: mod_base = OTHER; note = Locked nucleic acid
  misc_feature 1..5: note = RNA
  misc_feature 6..9: note = DNA
  misc_feature 10: note = RNA
  misc_feature 11..15: note = DNA
  misc_feature 16..20: note = RNA
cagaggtgangcgaagtgca

SEQ ID NO: 1016 - DNA, 20 bp, synthetic construct
  source 1..20: mol_type = other DNA
  modified_base 1: mod_base = OTHER; note = 2'-O-methoxyethyl 5-methylcytosine with phosphorothioate linkage
  modified_base 2: mod_base = OTHER; note = 2'-O-methoxyethyl modified nucleotide with phosphorothioate linkage
  modified_base 3: mod_base = OTHER; note = 2'-O-methoxyethyl modified nucleotide with phosphorothioate linkage
  modified_base 4: mod_base = OTHER; note = 2'-O-methoxyethyl modified nucleotide with phosphorothioate linkage
  modified_base 5: mod_base = OTHER; note = 2'-O-methoxyethyl modified nucleotide with phosphorothioate linkage
  modified_base 6: mod_base = OTHER; note = Nucleotide with phosphorothioate linkage
  modified_base 7: mod_base = OTHER; note = Thymine with phosphorothioate linkage
  modified_base 8: mod_base = OTHER; note = Nucleotide with phosphorothioate linkage
  modified_base 9: mod_base = OTHER; note = Nucleotide with phosphorothioate linkage
  modified_base 10: mod_base = OTHER; note = Nucleotide with phosphorothioate linkage
  modified_base 11: mod_base = OTHER; note = 2'-O-methyl modified abasic nucleotide with phosphorothioate linkage
  modified_base 12: mod_base = OTHER; note = 5-methylcytosine with phosphorothioate linkage
  modified_base 13: mod_base = OTHER; note = Nucleotide with phosphorothioate linkage
  modified_base 14: mod_base = OTHER; note = Nucleotide with phosphorothioate linkage
  modified_base 15: mod_base = OTHER; note = Nucleotide with phosphorothioate linkage
  modified_base 16: mod_base = OTHER; note = Locked nucleic acid with phosphorothioate linkage
  modified_base 17: mod_base = OTHER; note = 2'-O-methoxyethyl modified thymine with phosphorothioate linkage
  modified_base 18: mod_base = OTHER; note = Locked nucleic acid with phosphorothioate linkage
  modified_base 19: mod_base = OTHER; note = 2'-O-methoxyethyl 5-methylcytosine with phosphorothioate linkage
  modified_base 20: mod_base = OTHER; note = Locked nucleic acid
  misc_feature 1..5: note = RNA
  misc_feature 6..10: note = DNA
  misc_feature 11: note = RNA
  misc_feature 12..15: note = DNA
  misc_feature 16..20: note = RNA
cagaggtgaancgaagtgca

SEQ ID NO: 1017 - DNA, 20 bp, synthetic construct
  source 1..20: mol_type = other DNA
  modified_base 1: mod_base = OTHER; note = 2'-O-methoxyethyl 5-methylcytosine with phosphorothioate linkage
  modified_base 2: mod_base = OTHER; note = 2'-O-methoxyethyl modified nucleotide with phosphorothioate linkage
  modified_base 3: mod_base = OTHER; note = 2'-O-methoxyethyl modified nucleotide with phosphorothioate linkage
  modified_base 4: mod_base = OTHER; note = 2'-O-methoxyethyl modified nucleotide with phosphorothioate linkage
  modified_base 5: mod_base = OTHER; note = 2'-O-methoxyethyl modified nucleotide with phosphorothioate linkage
  modified_base 6: mod_base = OTHER; note = Nucleotide with phosphorothioate linkage
  modified_base 7: mod_base = OTHER; note = Thymine with phosphorothioate linkage
  modified_base 8: mod_base = OTHER; note = Nucleotide with phosphorothioate linkage
  modified_base 9: mod_base = OTHER; note = Nucleotide with phosphorothioate linkage
  modified_base 10: mod_base = OTHER; note = Nucleotide with phosphorothioate linkage
  modified_base 11: mod_base = OTHER; note = Nucleotide with phosphorothioate linkage
  modified_base 12: mod_base = OTHER; note = 2'-O-methyl modified abasic nucleotide with phosphorothioate linkage
  modified_base 13: mod_base = OTHER; note = Nucleotide with phosphorothioate linkage
  modified_base 14: mod_base = OTHER; note = Nucleotide with phosphorothioate linkage
  modified_base 15: mod_base = OTHER; note = Nucleotide with phosphorothioate linkage
  modified_base 16: mod_base = OTHER; note = Locked nucleic acid with phosphorothioate linkage
  modified_base 17: mod_base = OTHER; note = 2'-O-methoxyethyl modified thymine with phosphorothioate linkage
  modified_base 18: mod_base = OTHER; note = Locked nucleic acid with phosphorothioate linkage
  modified_base 19: mod_base = OTHER; note = 2'-O-methoxyethyl 5-methylcytosine with phosphorothioate linkage
  modified_base 20: mod_base = OTHER; note = Locked nucleic acid
  misc_feature 1..5: note = RNA
  misc_feature 6..11: note = DNA
  misc_feature 12: note = RNA
  misc_feature 13..15: note = DNA
  misc_feature 16..20: note = RNA
cagaggtgaagngaagtgca

SEQ ID NO: 1018 - DNA, 20 bp, synthetic construct
  source 1..20: mol_type = other DNA
  modified_base 1: mod_base = OTHER; note = 2'-O-methoxyethyl 5-methylcytosine with phosphorothioate linkage
  modified_base 2: mod_base = OTHER; note = 2'-O-methoxyethyl modified nucleotide with phosphorothioate linkage
  modified_base 3: mod_base = OTHER; note = 2'-O-methoxyethyl modified nucleotide with phosphorothioate linkage
  modified_base 4: mod_base = OTHER; note = 2'-O-methoxyethyl modified nucleotide with phosphorothioate linkage
  modified_base 5: mod_base = OTHER; note = 2'-O-methoxyethyl modified nucleotide with phosphorothioate linkage
  modified_base 6: mod_base = OTHER; note = Nucleotide with phosphorothioate linkage
  modified_base 7: mod_base = OTHER; note = Thymine with phosphorothioate linkage
  modified_base 8: mod_base = OTHER; note = Nucleotide with phosphorothioate linkage
  modified_base 9: mod_base = OTHER; note = Nucleotide with phosphorothioate linkage
  modified_base 10: mod_base = OTHER; note = Nucleotide with phosphorothioate linkage
  modified_base 11: mod_base = OTHER; note = Nucleotide with phosphorothioate linkage
  modified_base 12: mod_base = OTHER; note = 5-methylcytosine with phosphorothioate linkage
  modified_base 13: mod_base = OTHER; note = 2'-O-methyl modified abasic nucleotide with phosphorothioate linkage
  modified_base 14: mod_base = OTHER; note = Nucleotide with phosphorothioate linkage
  modified_base 15: mod_base = OTHER; note = Nucleotide with phosphorothioate linkage
  modified_base 16: mod_base = OTHER; note = Locked nucleic acid with phosphorothioate linkage
  modified_base 17: mod_base = OTHER; note = 2'-O-methoxyethyl modified thymine with phosphorothioate linkage
  modified_base 18: mod_base = OTHER; note = Locked nucleic acid with phosphorothioate linkage
  modified_base 19: mod_base = OTHER; note = 2'-O-methoxyethyl 5-methylcytosine with phosphorothioate linkage
  modified_base 20: mod_base = OTHER; note = Locked nucleic acid
  misc_feature 1..5: note = RNA
  misc_feature 6..12: note = DNA
  misc_feature 13: note = RNA
  misc_feature 14..15: note = DNA
  misc_feature 16..20: note = RNA
cagaggtgaagcnaagtgca

SEQ ID NO: 1019 - DNA, 20 bp, synthetic construct
  source 1..20: mol_type = other DNA
  modified_base 1: mod_base = OTHER; note = 2'-O-methoxyethyl 5-methylcytosine with phosphorothioate linkage
  modified_base 2: mod_base = OTHER; note = 2'-O-methoxyethyl modified nucleotide with phosphorothioate linkage
  modified_base 3: mod_base = OTHER; note = 2'-O-methoxyethyl modified nucleotide with phosphorothioate linkage
  modified_base 4: mod_base = OTHER; note = 2'-O-methoxyethyl modified nucleotide with phosphorothioate linkage
  modified_base 5: mod_base = OTHER; note = 2'-O-methoxyethyl modified nucleotide with phosphorothioate linkage
  modified_base 6: mod_base = OTHER; note = Nucleotide with phosphorothioate linkage
  modified_base 7: mod_base = OTHER; note = Thymine with phosphorothioate linkage
  modified_base 8: mod_base = OTHER; note = Nucleotide with phosphorothioate linkage
  modified_base 9: mod_base = OTHER; note = Nucleotide with phosphorothioate linkage
  modified_base 10: mod_base = OTHER; note = Nucleotide with phosphorothioate linkage
  modified_base 11: mod_base = OTHER; note = Nucleotide with phosphorothioate linkage
  modified_base 12: mod_base = OTHER; note = 5-methylcytosine with phosphorothioate linkage
  modified_base 13: mod_base = OTHER; note = Nucleotide with phosphorothioate linkage
  modified_base 14: mod_base = OTHER; note = 2'-O-methyl modified abasic nucleotide with phosphorothioate linkage
  modified_base 15: mod_base = OTHER; note = Nucleotide with phosphorothioate linkage
  modified_base 16: mod_base = OTHER; note = Locked nucleic acid with phosphorothioate linkage
  modified_base 17: mod_base = OTHER; note = 2'-O-methoxyethyl modified thymine with phosphorothioate linkage
  modified_base 18: mod_base = OTHER; note = Locked nucleic acid with phosphorothioate linkage
  modified_base 19: mod_base = OTHER; note = 2'-O-methoxyethyl 5-methylcytosine with phosphorothioate linkage
  modified_base 20: mod_base = OTHER; note = Locked nucleic acid
  misc_feature 1..5: note = RNA
  misc_feature 6..13: note = DNA
  misc_feature 14: note = RNA
  misc_feature 15: note = DNA
  misc_feature 16..20: note = RNA
cagaggtgaagcgnagtgca

SEQ ID NO: 1020 - DNA, 20 bp, synthetic construct
  source 1..20: mol_type = other DNA
  modified_base 1: mod_base = OTHER; note = 2'-O-methoxyethyl 5-methylcytosine with phosphorothioate linkage
  modified_base 2: mod_base = OTHER; note = 2'-O-methoxyethyl modified nucleotide with phosphorothioate linkage
  modified_base 3: mod_base = OTHER; note = 2'-O-methoxyethyl modified nucleotide with phosphorothioate linkage
  modified_base 4: mod_base = OTHER; note = 2'-O-methoxyethyl modified nucleotide with phosphorothioate linkage
  modified_base 5: mod_base = OTHER; note = 2'-O-methoxyethyl modified nucleotide with phosphorothioate linkage
  modified_base 6: mod_base = OTHER; note = Nucleotide with phosphorothioate linkage
  modified_base 7: mod_base = OTHER; note = Thymine with phosphorothioate linkage
  modified_base 8: mod_base = OTHER; note = Nucleotide with phosphorothioate linkage
  modified_base 9: mod_base = OTHER; note = Nucleotide with phosphorothioate linkage
  modified_base 10: mod_base = OTHER; note = Nucleotide with phosphorothioate linkage
  modified_base 11: mod_base = OTHER; note = Nucleotide with phosphorothioate linkage
  modified_base 12: mod_base = OTHER; note = 5-methylcytosine with phosphorothioate linkage
  modified_base 13: mod_base = OTHER; note = Nucleotide with phosphorothioate linkage
  modified_base 14: mod_base = OTHER; note = Nucleotide with phosphorothioate linkage
  modified_base 15: mod_base = OTHER; note = 2'-O-methyl modified abasic nucleotide with phosphorothioate linkage
  modified_base 16: mod_base = OTHER; note = Locked nucleic acid with phosphorothioate linkage
  modified_base 17: mod_base = OTHER; note = 2'-O-methoxyethyl modified thymine with phosphorothioate linkage
  modified_base 18: mod_base = OTHER; note = Locked nucleic acid with phosphorothioate linkage
  modified_base 19: mod_base = OTHER; note = 2'-O-methoxyethyl 5-methylcytosine with phosphorothioate linkage
  modified_base 20: mod_base = OTHER; note = Locked nucleic acid
  misc_feature 1..5: note = RNA
  misc_feature 6..14: note = DNA
  misc_feature 15..20: note = RNA
cagaggtgaagcgangtgca

SEQ ID NO: 1021 - DNA, 20 bp, synthetic construct
  source 1..20: mol_type = other DNA
  modified_base 1: mod_base = OTHER; note = Locked nucleic acid with phosphorothioate linkage
  modified_base 2: mod_base = OTHER; note = Locked 5-methylcytosine with phosphorothioate linkage
  modified_base 3: mod_base = OTHER; note = 2'-O-methoxyethyl modified nucleotide with phosphorothioate linkage
  modified_base 4: mod_base = OTHER; note = 2'-O-methoxyethyl modified nucleotide with phosphorothioate linkage
  modified_base 5: mod_base = OTHER; note = 2'-O-methoxyethyl modified nucleotide with phosphorothioate linkage
  modified_base 6: mod_base = OTHER; note = Nucleotide with phosphorothioate linkage
  modified_base 7: mod_base = OTHER; note = Nucleotide with phosphorothioate linkage
  modified_base 8: mod_base = OTHER; note = Thymine with phosphorothioate linkage
  modified_base 9: mod_base = OTHER; note = Nucleotide with phosphorothioate linkage
  modified_base 10: mod_base = OTHER; note = Nucleotide with phosphorothioate linkage
  modified_base 11: mod_base = OTHER; note = 2'-O-methyl modified abasic nucleotide with phosphorothioate linkage
  modified_base 12: mod_base = OTHER; note = Nucleotide with phosphorothioate linkage
  modified_base 13: mod_base = OTHER; note = 5-methylcytosine with phosphorothioate linkage
  modified_base 14: mod_base = OTHER; note = Nucleotide with phosphorothioate linkage
  modified_base 15: mod_base = OTHER; note = Nucleotide with phosphorothioate linkage
  modified_base 16: mod_base = OTHER; note = 2'-O-methoxyethyl modified nucleotide with phosphorothioate linkage
  modified_base 17: mod_base = OTHER; note = 2'-O-methoxyethyl modified nucleotide with phosphorothioate linkage
  modified_base 18: mod_base = OTHER; note = 2'-O-methoxyethyl modified thymine with phosphorothioate linkage
  modified_base 19: mod_base = OTHER; note = 2'-O-methoxyethyl modified nucleotide with phosphorothioate linkage
  modified_base 20: mod_base = OTHER; note = 2'-O-methoxyethyl 5-methylcytosine
  misc_feature 1..5: note = RNA
  misc_feature 6..10: note = DNA
  misc_feature 11: note = RNA
  misc_feature 12..15: note = DNA
  misc_feature 16..20: note = RNA
gcagaggtgangcgaagtgc

SEQ ID NO: 1022 - DNA, 20 bp, synthetic construct
  source 1..20: mol_type = other DNA
  modified_base 1: mod_base = OTHER; note = Locked nucleic acid with phosphorothioate linkage
  modified_base 2: mod_base = OTHER; note = 2'-O-methoxyethyl 5-methylcytosine with phosphorothioate linkage
  modified_base 3: mod_base = OTHER; note = Locked nucleic acid with phosphorothioate linkage
  modified_base 4: mod_base = OTHER; note = 2'-O-methoxyethyl modified nucleotide with phosphorothioate linkage
  modified_base 5: mod_base = OTHER; note = 2'-O-methoxyethyl modified nucleotide with phosphorothioate linkage
  modified_base 6: mod_base = OTHER; note = Nucleotide with phosphorothioate linkage
  modified_base 7: mod_base = OTHER; note = Nucleotide with phosphorothioate linkage
  modified_base 8: mod_base = OTHER; note = Thymine with phosphorothioate linkage
  modified_base 9: mod_base = OTHER; note = Nucleotide with phosphorothioate linkage
  modified_base 10: mod_base = OTHER; note = Nucleotide with phosphorothioate linkage
  modified_base 11: mod_base = OTHER; note = 2'-O-methyl modified abasic nucleotide with phosphorothioate linkage
  modified_base 12: mod_base = OTHER; note = Nucleotide with phosphorothioate linkage
  modified_base 13: mod_base = OTHER; note = 5-methylcytosine with phosphorothioate linkage
  modified_base 14: mod_base = OTHER; note = Nucleotide with phosphorothioate linkage
  modified_base 15: mod_base = OTHER; note = Nucleotide with phosphorothioate linkage
  modified_base 16: mod_base = OTHER; note = 2'-O-methoxyethyl modified nucleotide with phosphorothioate linkage
  modified_base 17: mod_base = OTHER; note = 2'-O-methoxyethyl modified nucleotide with phosphorothioate linkage
  modified_base 18: mod_base = OTHER; note = 2'-O-methoxyethyl modified thymine with phosphorothioate linkage
  modified_base 19: mod_base = OTHER; note = 2'-O-methoxyethyl modified nucleotide with phosphorothioate linkage
  modified_base 20: mod_base = OTHER; note = 2'-O-methoxyethyl 5-methylcytosine
  misc_feature 1..5: note = RNA
  misc_feature 6..10: note = DNA
  misc_feature 11: note = RNA
  misc_feature 12..15: note = DNA
  misc_feature 16..20: note = RNA
gcagaggtgangcgaagtgc

SEQ ID NO: 1023 - DNA, 20 bp, synthetic construct
  source 1..20: mol_type = other DNA
  modified_base 1: mod_base = OTHER; note = Locked nucleic acid with phosphorothioate linkage
  modified_base 2: mod_base = OTHER; note = 2'-O-methoxyethyl 5-methylcytosine with phosphorothioate linkage
  modified_base 3: mod_base = OTHER; note = 2'-O-methoxyethyl modified nucleotide with phosphorothioate linkage
  modified_base 4: mod_base = OTHER; note = Locked nucleic acid with phosphorothioate linkage
  modified_base 5: mod_base = OTHER; note = 2'-O-methoxyethyl modified nucleotide with phosphorothioate linkage
  modified_base 6: mod_base = OTHER; note = Nucleotide with phosphorothioate linkage
  modified_base 7: mod_base = OTHER; note = Nucleotide with phosphorothioate linkage
  modified_base 8: mod_base = OTHER; note = Thymine with phosphorothioate linkage
  modified_base 9: mod_base = OTHER; note = Nucleotide with phosphorothioate linkage
  modified_base 10: mod_base = OTHER; note = Nucleotide with phosphorothioate linkage
  modified_base 11: mod_base = OTHER; note = 2'-O-methyl modified abasic nucleotide with phosphorothioate linkage
  modified_base 12: mod_base = OTHER; note = Nucleotide with phosphorothioate linkage
  modified_base 13: mod_base = OTHER; note = 5-methylcytosine with phosphorothioate linkage
  modified_base 14: mod_base = OTHER; note = Nucleotide with phosphorothioate linkage
  modified_base 15: mod_base = OTHER; note = Nucleotide with phosphorothioate linkage
  modified_base 16: mod_base = OTHER; note = 2'-O-methoxyethyl modified nucleotide with phosphorothioate linkage
  modified_base 17: mod_base = OTHER; note = 2'-O-methoxyethyl modified nucleotide with phosphorothioate linkage
  modified_base 18: mod_base = OTHER; note = 2'-O-methoxyethyl modified thymine with phosphorothioate linkage
  modified_base 19: mod_base = OTHER; note = 2'-O-methoxyethyl modified nucleotide with phosphorothioate linkage
  modified_base 20: mod_base = OTHER; note = 2'-O-methoxyethyl 5-methylcytosine
  misc_feature 1..5: note = RNA
  misc_feature 6..10: note = DNA
  misc_feature 11: note = RNA
  misc_feature 12..15: note = DNA
  misc_feature 16..20: note = RNA
gcagaggtgangcgaagtgc

SEQ ID NO: 1024 - DNA, 20 bp, synthetic construct
  source 1..20: mol_type = other DNA
  modified_base 1: mod_base = OTHER; note = Locked nucleic acid with phosphorothioate linkage
  modified_base 2: mod_base = OTHER; note = 2'-O-methoxyethyl 5-methylcytosine with phosphorothioate linkage
  modified_base 3: mod_base = OTHER; note = 2'-O-methoxyethyl modified nucleotide with phosphorothioate linkage
  modified_base 4: mod_base = OTHER; note = 2'-O-methoxyethyl modified nucleotide with phosphorothioate linkage
  modified_base 5: mod_base = OTHER; note = Locked nucleic acid with phosphorothioate linkage
  modified_base 6: mod_base = OTHER; note = Nucleotide with phosphorothioate linkage
  modified_base 7: mod_base = OTHER; note = Nucleotide with phosphorothioate linkage
  modified_base 8: mod_base = OTHER; note = Thymine with phosphorothioate linkage
  modified_base 9: mod_base = OTHER; note = Nucleotide with phosphorothioate linkage
  modified_base 10: mod_base = OTHER; note = Nucleotide with phosphorothioate linkage
  modified_base 11: mod_base = OTHER; note = 2'-O-methyl modified abasic nucleotide with phosphorothioate linkage
  modified_base 12: mod_base = OTHER; note = Nucleotide with phosphorothioate linkage
  modified_base 13: mod_base = OTHER; note = 5-methylcytosine with phosphorothioate linkage
  modified_base 14: mod_base = OTHER; note = Nucleotide with phosphorothioate linkage
  modified_base 15: mod_base = OTHER; note = Nucleotide with phosphorothioate linkage
  modified_base 16: mod_base = OTHER; note = 2'-O-methoxyethyl modified nucleotide with phosphorothioate linkage
  modified_base 17: mod_base = OTHER; note = 2'-O-methoxyethyl modified nucleotide with phosphorothioate linkage
  modified_base 18: mod_base = OTHER; note = 2'-O-methoxyethyl modified thymine with phosphorothioate linkage
  modified_base 19: mod_base = OTHER; note = 2'-O-methoxyethyl modified nucleotide with phosphorothioate linkage
  modified_base 20: mod_base = OTHER; note = 2'-O-methoxyethyl 5-methylcytosine
  misc_feature 1..5: note = RNA
  misc_feature 6..10: note = DNA
  misc_feature 11: note = RNA
  misc_feature 12..15: note = DNA
  misc_feature 16..20: note = RNA
gcagaggtgangcgaagtgc

SEQ ID NO: 1025 - DNA, 20 bp, synthetic construct
  source 1..20: mol_type = other DNA
  modified_base 1: mod_base = OTHER; note = Locked nucleic acid with phosphorothioate linkage
  modified_base 2: mod_base = OTHER; note = 2'-O-methoxyethyl 5-methylcytosine with phosphorothioate linkage
  modified_base 3: mod_base = OTHER; note = 2'-O-methoxyethyl modified nucleotide with phosphorothioate linkage
  modified_base 4: mod_base = OTHER; note = 2'-O-methoxyethyl modified nucleotide with phosphorothioate linkage
  modified_base 5: mod_base = OTHER; note = 2'-O-methoxyethyl modified nucleotide with phosphorothioate linkage
  modified_base 6: mod_base = OTHER; note = Nucleotide with phosphorothioate linkage
  modified_base 7: mod_base = OTHER; note = Nucleotide with phosphorothioate linkage
  modified_base 8: mod_base = OTHER; note = Thymine with phosphorothioate linkage
  modified_base 9: mod_base = OTHER; note = Nucleotide with phosphorothioate linkage
  modified_base 10: mod_base = OTHER; note = Nucleotide with phosphorothioate linkage
  modified_base 11: mod_base = OTHER; note = 2'-O-methyl modified abasic nucleotide with phosphorothioate linkage
  modified_base 12: mod_base = OTHER; note = Nucleotide with phosphorothioate linkage
  modified_base 13: mod_base = OTHER; note = 5-methylcytosine with phosphorothioate linkage
  modified_base 14: mod_base = OTHER; note = Nucleotide with phosphorothioate linkage
  modified_base 15: mod_base = OTHER; note = Nucleotide with phosphorothioate linkage
  modified_base 16: mod_base = OTHER; note = Locked nucleic acid with phosphorothioate linkage
  modified_base 17: mod_base = OTHER; note = 2'-O-methoxyethyl modified nucleotide with phosphorothioate linkage
  modified_base 18: mod_base = OTHER; note = 2'-O-methoxyethyl modified thymine with phosphorothioate linkage
  modified_base 19: mod_base = OTHER; note = 2'-O-methoxyethyl modified nucleotide with phosphorothioate linkage
  modified_base 20: mod_base = OTHER; note = 2'-O-methoxyethyl 5-methylcytosine
  misc_feature 1..5: note = RNA
  misc_feature 6..10: note = DNA
  misc_feature 11: note = RNA
  misc_feature 12..15: note = DNA
  misc_feature 16..20: note = RNA
gcagaggtgangcgaagtgc

SEQ ID NO: 1026 - DNA, 20 bp, synthetic construct
  source 1..20: mol_type = other DNA
  modified_base 1: mod_base = OTHER; note = Locked nucleic acid with phosphorothioate linkage
  modified_base 2: mod_base = OTHER; note = 2'-O-methoxyethyl 5-methylcytosine with phosphorothioate linkage
  modified_base 3: mod_base = OTHER; note = 2'-O-methoxyethyl modified nucleotide with phosphorothioate linkage
  modified_base 4: mod_base = OTHER; note = 2'-O-methoxyethyl modified nucleotide with phosphorothioate linkage
  modified_base 5: mod_base = OTHER; note = 2'-O-methoxyethyl modified nucleotide with phosphorothioate linkage
  modified_base 6: mod_base = OTHER; note = Nucleotide with phosphorothioate linkage
  modified_base 7: mod_base = OTHER; note = Nucleotide with phosphorothioate linkage
  modified_base 8: mod_base = OTHER; note = Thymine with phosphorothioate linkage
  modified_base 9: mod_base = OTHER; note = Nucleotide with phosphorothioate linkage
  modified_base 10: mod_base = OTHER; note = Nucleotide with phosphorothioate linkage
  modified_base 11: mod_base = OTHER; note = 2'-O-methyl modified abasic nucleotide with phosphorothioate linkage
  modified_base 12: mod_base = OTHER; note = Nucleotide with phosphorothioate linkage
  modified_base 13: mod_base = OTHER; note = 5-methylcytosine with phosphorothioate linkage
  modified_base 14: mod_base = OTHER; note = Nucleotide with phosphorothioate linkage
  modified_base 15: mod_base = OTHER; note = Nucleotide with phosphorothioate linkage
  modified_base 16: mod_base = OTHER; note = 2'-O-methoxyethyl modified nucleotide with phosphorothioate linkage
  modified_base 17: mod_base = OTHER; note = Locked nucleic acid with phosphorothioate linkage
  modified_base 18: mod_base = OTHER; note = 2'-O-methoxyethyl modified thymine with phosphorothioate linkage
  modified_base 19: mod_base = OTHER; note = 2'-O-methoxyethyl modified nucleotide with phosphorothioate linkage
  modified_base 20: mod_base = OTHER; note = 2'-O-methoxyethyl 5-methylcytosine
  misc_feature 1..5: note = RNA
  misc_feature 6..10: note = DNA
  misc_feature 11: note = RNA
  misc_feature 12..15: note = DNA
  misc_feature 16..20: note = RNA
gcagaggtgangcgaagtgc

SEQ ID NO: 1027 - DNA, 20 bp, synthetic construct
  source 1..20: mol_type = other DNA
  modified_base 1: mod_base = OTHER; note = Locked nucleic acid with phosphorothioate linkage
  modified_base 2: mod_base = OTHER; note = 2'-O-methoxyethyl 5-methylcytosine with phosphorothioate linkage
  modified_base 3: mod_base = OTHER; note = 2'-O-methoxyethyl modified nucleotide with phosphorothioate linkage
  modified_base 4: mod_base = OTHER; note = 2'-O-methoxyethyl modified nucleotide with phosphorothioate linkage
  modified_base 5: mod_base = OTHER; note = 2'-O-methoxyethyl modified nucleotide with phosphorothioate linkage
  modified_base 6: mod_base = OTHER; note = Nucleotide with phosphorothioate linkage
  modified_base 7: mod_base = OTHER; note = Nucleotide with phosphorothioate linkage
  modified_base 8: mod_base = OTHER; note = Thymine with phosphorothioate linkage
  modified_base 9: mod_base = OTHER; note = Nucleotide with phosphorothioate linkage
  modified_base 10: mod_base = OTHER; note = Nucleotide with phosphorothioate linkage
  modified_base 11: mod_base = OTHER; note = 2'-O-methyl modified abasic nucleotide with phosphorothioate linkage
  modified_base 12: mod_base = OTHER; note = Nucleotide with phosphorothioate linkage
  modified_base 13: mod_base = OTHER; note = 5-methylcytosine with phosphorothioate linkage
  modified_base 14: mod_base = OTHER; note = Nucleotide with phosphorothioate linkage
  modified_base 15: mod_base = OTHER; note = Nucleotide with phosphorothioate linkage
  modified_base 16: mod_base = OTHER; note = 2'-O-methoxyethyl modified nucleotide with phosphorothioate linkage
  modified_base 17: mod_base = OTHER; note = 2'-O-methoxyethyl modified nucleotide with phosphorothioate linkage
  modified_base 18: mod_base = OTHER; note = Locked thymine with phosphorothioate linkage
  modified_base 19: mod_base = OTHER; note = 2'-O-methoxyethyl modified nucleotide with phosphorothioate linkage
  modified_base 20: mod_base = OTHER; note = 2'-O-methoxyethyl 5-methylcytosine
  misc_feature 1..5: note = RNA
  misc_feature 6..10: note = DNA
  misc_feature 11: note = RNA
  misc_feature 12..15: note = DNA
  misc_feature 16..20: note = RNA
gcagaggtgangcgaagtgc

SEQ ID NO: 1028 - DNA, 20 bp, synthetic construct
  source 1..20: mol_type = other DNA
  modified_base 1: mod_base = OTHER; note = Locked nucleic acid with phosphorothioate linkage
  modified_base 2: mod_base = OTHER; note = 2'-O-methoxyethyl 5-methylcytosine with phosphorothioate linkage
  modified_base 3: mod_base = OTHER; note = 2'-O-methoxyethyl modified nucleotide with phosphorothioate linkage
  modified_base 4: mod_base = OTHER; note = 2'-O-methoxyethyl modified nucleotide with phosphorothioate linkage
  modified_base 5: mod_base = OTHER; note = 2'-O-methoxyethyl modified nucleotide with phosphorothioate linkage
  modified_base 6: mod_base = OTHER; note = Nucleotide with phosphorothioate linkage
  modified_base 7: mod_base = OTHER; note = Nucleotide with phosphorothioate linkage
  modified_base 8: mod_base = OTHER; note = Thymine with phosphorothioate linkage
  modified_base 9: mod_base = OTHER; note = Nucleotide with phosphorothioate linkage
  modified_base 10: mod_base = OTHER; note = Nucleotide with phosphorothioate linkage
  modified_base 11: mod_base = OTHER; note = 2'-O-methyl modified abasic nucleotide with phosphorothioate linkage
  modified_base 12: mod_base = OTHER; note = Nucleotide with phosphorothioate linkage
  modified_base 13: mod_base = OTHER; note = 5-methylcytosine with phosphorothioate linkage
  modified_base 14: mod_base = OTHER; note = Nucleotide with phosphorothioate linkage
  modified_base 15: mod_base = OTHER; note = Nucleotide with phosphorothioate linkage
  modified_base 16: mod_base = OTHER; note = 2'-O-methoxyethyl modified nucleotide with phosphorothioate linkage
  modified_base 17: mod_base = OTHER; note = 2'-O-methoxyethyl modified nucleotide with phosphorothioate linkage
  modified_base 18: mod_base = OTHER; note = 2'-O-methoxyethyl modified thymine with phosphorothioate linkage
  modified_base 19: mod_base = OTHER; note = Locked nucleic acid with phosphorothioate linkage
  modified_base 20: mod_base = OTHER; note = 2'-O-methoxyethyl 5-methylcytosine
  misc_feature 1..5: note = RNA
  misc_feature 6..10: note = DNA
  misc_feature 11: note = RNA
  misc_feature 12..15: note = DNA
  misc_feature 16..20: note = RNA
gcagaggtgangcgaagtgc

SEQ ID NO: 1029 - DNA, 20 bp, synthetic construct
  source 1..20: mol_type = other DNA
  modified_base 1: mod_base = OTHER; note = Locked nucleic acid with phosphorothioate linkage
  modified_base 2: mod_base = OTHER; note = 2'-O-methoxyethyl 5-methylcytosine with phosphorothioate linkage
  modified_base 3: mod_base = OTHER; note = 2'-O-methoxyethyl modified nucleotide with phosphorothioate linkage
  modified_base 4: mod_base = OTHER; note = 2'-O-methoxyethyl modified nucleotide with phosphorothioate linkage
  modified_base 5: mod_base = OTHER; note = 2'-O-methoxyethyl modified nucleotide with phosphorothioate linkage
  modified_base 6: mod_base = OTHER; note = Nucleotide with phosphorothioate linkage
  modified_base 7: mod_base = OTHER; note = Nucleotide with phosphorothioate linkage
  modified_base 8: mod_base = OTHER; note = Thymine with phosphorothioate linkage
  modified_base 9: mod_base = OTHER; note = Nucleotide with phosphorothioate linkage
  modified_base 10: mod_base = OTHER; note = Nucleotide with phosphorothioate linkage
  modified_base 11: mod_base = OTHER; note = 2'-O-methyl modified abasic nucleotide with phosphorothioate linkage
  modified_base 12: mod_base = OTHER; note = Nucleotide with phosphorothioate linkage
  modified_base 13: mod_base = OTHER; note = 5-methylcytosine with phosphorothioate linkage
  modified_base 14: mod_base = OTHER; note = Nucleotide with phosphorothioate linkage
  modified_base 15: mod_base = OTHER; note = Nucleotide with phosphorothioate linkage
  modified_base 16: mod_base = OTHER; note = 2'-O-methoxyethyl modified nucleotide with phosphorothioate linkage
  modified_base 17: mod_base = OTHER; note = 2'-O-methoxyethyl modified nucleotide with phosphorothioate linkage
  modified_base 18: mod_base = OTHER; note = 2'-O-methoxyethyl modified thymine with phosphorothioate linkage
  modified_base 19: mod_base = OTHER; note = 2'-O-methoxyethyl modified nucleotide with phosphorothioate linkage
  modified_base 20: mod_base = OTHER; note = Locked 5-methylcytosine
  misc_feature 1..5: note = RNA
  misc_feature 6..10: note = DNA
  misc_feature 11: note = RNA
  misc_feature 12..15: note = DNA
  misc_feature 16..20: note = RNA
gcagaggtgangcgaagtgc

SEQ ID NO: 1030 - DNA, 20 bp, synthetic construct
  source 1..20: mol_type = other DNA
  modified_base 1: mod_base = OTHER; note = 2'-O-methoxyethyl modified nucleotide with phosphorothioate linkage
  modified_base 2: mod_base = OTHER; note = Locked 5-methylcytosine with phosphorothioate linkage
  modified_base 3: mod_base = OTHER; note = Locked nucleic acid with phosphorothioate linkage
  modified_base 4: mod_base = OTHER; note = 2'-O-methoxyethyl modified nucleotide with phosphorothioate linkage
  modified_base 5: mod_base = OTHER; note = 2'-O-methoxyethyl modified nucleotide with phosphorothioate linkage
  modified_base 6: mod_base = OTHER; note = Nucleotide with phosphorothioate linkage
  modified_base 7: mod_base = OTHER; note = Nucleotide with phosphorothioate linkage
  modified_base 8: mod_base = OTHER; note = Thymine with phosphorothioate linkage
  modified_base 9: mod_base = OTHER; note = Nucleotide with phosphorothioate linkage
  modified_base 10: mod_base = OTHER; note = Nucleotide with phosphorothioate linkage
  modified_base 11: mod_base = OTHER; note = 2'-O-methyl modified abasic nucleotide with phosphorothioate linkage
  modified_base 12: mod_base = OTHER; note = Nucleotide with phosphorothioate linkage
  modified_base 13: mod_base = OTHER; note = 5-methylcytosine with phosphorothioate linkage
  modified_base 14: mod_base = OTHER; note = Nucleotide with phosphorothioate linkage
  modified_base 15: mod_base = OTHER; note = Nucleotide with phosphorothioate linkage
  modified_base 16: mod_base = OTHER; note = 2'-O-methoxyethyl modified nucleotide with phosphorothioate linkage
  modified_base 17: mod_base = OTHER; note = 2'-O-methoxyethyl modified nucleotide with phosphorothioate linkage
  modified_base 18: mod_base = OTHER; note = 2'-O-methoxyethyl modified thymine with phosphorothioate linkage
  modified_base 19: mod_base = OTHER; note = 2'-O-methoxyethyl modified nucleotide with phosphorothioate linkage
  modified_base 20: mod_base = OTHER; note = 2'-O-methoxyethyl 5-methylcytosine
  misc_feature 1..5: note = RNA
  misc_feature 6..10: note = DNA
  misc_feature 11: note = RNA
  misc_feature 12..15: note = DNA
  misc_feature 16..20: note = RNA
gcagaggtgangcgaagtgc

SEQ ID NO: 1031 - DNA, 20 bp, synthetic construct
  source 1..20: mol_type = other DNA
  modified_base 1: mod_base = OTHER; note = 2'-O-methoxyethyl modified nucleotide with phosphorothioate linkage
  modified_base 2: mod_base = OTHER; note = Locked 5-methylcytosine with phosphorothioate linkage
  modified_base 3: mod_base = OTHER; note = 2'-O-methoxyethyl modified nucleotide with phosphorothioate linkage
  modified_base 4: mod_base = OTHER; note = Locked nucleic acid with phosphorothioate linkage
  modified_base 5: mod_base = OTHER; note = 2'-O-methoxyethyl modified nucleotide with phosphorothioate linkage
  modified_base 6: mod_base = OTHER; note = Nucleotide with phosphorothioate linkage
  modified_base 7: mod_base = OTHER; note = Nucleotide with phosphorothioate linkage
  modified_base 8: mod_base = OTHER; note = Thymine with phosphorothioate linkage
  modified_base 9: mod_base = OTHER; note = Nucleotide with phosphorothioate linkage
  modified_base 10: mod_base = OTHER; note = Nucleotide with phosphorothioate linkage
  modified_base 11: mod_base = OTHER; note = 2'-O-methyl modified abasic nucleotide with phosphorothioate linkage
  modified_base 12: mod_base = OTHER; note = Nucleotide with phosphorothioate linkage
  modified_base 13: mod_base = OTHER; note = 5-methylcytosine with phosphorothioate linkage
  modified_base 14: mod_base = OTHER; note = Nucleotide with phosphorothioate linkage
  modified_base 15: mod_base = OTHER; note = Nucleotide with phosphorothioate linkage
  modified_base 16: mod_base = OTHER; note = 2'-O-methoxyethyl modified nucleotide with phosphorothioate linkage
  modified_base 17: mod_base = OTHER; note = 2'-O-methoxyethyl modified nucleotide with phosphorothioate linkage
  modified_base 18: mod_base = OTHER; note = 2'-O-methoxyethyl modified thymine with phosphorothioate linkage
  modified_base 19: mod_base = OTHER; note = 2'-O-methoxyethyl modified nucleotide with phosphorothioate linkage
  modified_base 20: mod_base = OTHER; note = 2'-O-methoxyethyl 5-methylcytosine
  misc_feature 1..5: note = RNA
  misc_feature 6..10: note = DNA
  misc_feature 11: note = RNA
  misc_feature 12..15: note = DNA
  misc_feature 16..20: note = RNA
gcagaggtgangcgaagtgc

SEQ ID NO: 1032 - DNA, 20 bp, synthetic construct
  source 1..20: mol_type = other DNA
  modified_base 1: mod_base = OTHER; note = 2'-O-methoxyethyl modified nucleotide with phosphorothioate linkage
  modified_base 2: mod_base = OTHER; note = Locked 5-methylcytosine with phosphorothioate linkage
  modified_base 3: mod_base = OTHER; note = 2'-O-methoxyethyl modified nucleotide with phosphorothioate linkage
  modified_base 4: mod_base = OTHER; note = 2'-O-methoxyethyl modified nucleotide with phosphorothioate linkage
  modified_base 5: mod_base = OTHER; note = Locked nucleic acid with phosphorothioate linkage
  modified_base 6: mod_base = OTHER; note = Nucleotide with phosphorothioate linkage
  modified_base 7: mod_base = OTHER; note = Nucleotide with phosphorothioate linkage
  modified_base 8: mod_base = OTHER; note = Thymine with phosphorothioate linkage
  modified_base 9: mod_base = OTHER; note = Nucleotide with phosphorothioate linkage
  modified_base 10: mod_base = OTHER; note = Nucleotide with phosphorothioate linkage
  modified_base 11: mod_base = OTHER; note = 2'-O-methyl modified abasic nucleotide with phosphorothioate linkage
  modified_base 12: mod_base = OTHER; note = Nucleotide with phosphorothioate linkage
  modified_base 13: mod_base = OTHER; note = 5-methylcytosine with phosphorothioate linkage
  modified_base 14: mod_base = OTHER; note = Nucleotide with phosphorothioate linkage
  modified_base 15: mod_base = OTHER; note = Nucleotide with phosphorothioate linkage
  modified_base 16: mod_base = OTHER; note = 2'-O-methoxyethyl modified nucleotide with phosphorothioate linkage
  modified_base 17: mod_base = OTHER; note = 2'-O-methoxyethyl modified nucleotide with phosphorothioate linkage
  modified_base 18: mod_base = OTHER; note = 2'-O-methoxyethyl modified thymine with phosphorothioate linkage
  modified_base 19: mod_base = OTHER; note = 2'-O-methoxyethyl modified nucleotide with phosphorothioate linkage
  modified_base 20: mod_base = OTHER; note = 2'-O-methoxyethyl 5-methylcytosine
  misc_feature 1..5: note = RNA
  misc_feature 6..10: note = DNA
  misc_feature 11: note = RNA
  misc_feature 12..15: note = DNA
  misc_feature 16..20: note = RNA
gcagaggtgangcgaagtgc

SEQ ID NO: 1033 - DNA, 20 bp, synthetic construct
  source 1..20: mol_type = other DNA
  modified_base 1: mod_base = OTHER; note = 2'-O-methoxyethyl modified nucleotide with phosphorothioate linkage
  modified_base 2: mod_base = OTHER; note = Locked 5-methylcytosine with phosphorothioate linkage
  modified_base 3: mod_base = OTHER; note = 2'-O-methoxyethyl modified nucleotide with phosphorothioate linkage
  modified_base 4: mod_base = OTHER; note = 2'-O-methoxyethyl modified nucleotide with phosphorothioate linkage
  modified_base 5: mod_base = OTHER; note = 2'-O-methoxyethyl modified nucleotide with phosphorothioate linkage
  modified_base 6: mod_base = OTHER; note = Nucleotide with phosphorothioate linkage
  modified_base 7: mod_base = OTHER; note = Nucleotide with phosphorothioate linkage
  modified_base 8: mod_base = OTHER; note = Thymine with phosphorothioate linkage
  modified_base 9: mod_base = OTHER; note = Nucleotide with phosphorothioate linkage
  modified_base 10: mod_base = OTHER; note = Nucleotide with phosphorothioate linkage
  modified_base 11: mod_base = OTHER; note = 2'-O-methyl modified abasic nucleotide with phosphorothioate linkage
  modified_base 12: mod_base = OTHER; note = Nucleotide with phosphorothioate linkage
  modified_base 13: mod_base = OTHER; note = 5-methylcytosine with phosphorothioate linkage
  modified_base 14: mod_base = OTHER; note = Nucleotide with phosphorothioate linkage
  modified_base 15: mod_base = OTHER; note = Nucleotide with phosphorothioate linkage
  modified_base 16: mod_base = OTHER; note = Locked nucleic acid with phosphorothioate linkage
  modified_base 17: mod_base = OTHER; note = 2'-O-methoxyethyl modified nucleotide with phosphorothioate linkage
  modified_base 18: mod_base = OTHER; note = 2'-O-methoxyethyl modified thymine with phosphorothioate linkage
  modified_base 19: mod_base = OTHER; note = 2'-O-methoxyethyl modified nucleotide with phosphorothioate linkage
  modified_base 20: mod_base = OTHER; note = 2'-O-methoxyethyl 5-methylcytosine
  misc_feature 1..5: note = RNA
  misc_feature 6..10: note = DNA
  misc_feature 11: note = RNA
  misc_feature 12..15: note = DNA
  misc_feature 16..20: note = RNA
gcagaggtgangcgaagtgc

SEQ ID NO: 1034 - DNA, 20 bp, synthetic construct
  source 1..20: mol_type = other DNA
  modified_base 1: mod_base = OTHER; note = 2'-O-methoxyethyl modified nucleotide with phosphorothioate linkage
  modified_base 2: mod_base = OTHER; note = Locked 5-methylcytosine with phosphorothioate linkage
  modified_base 3: mod_base = OTHER; note = 2'-O-methoxyethyl modified nucleotide with phosphorothioate linkage
  modified_base 4: mod_base = OTHER; note = 2'-O-methoxyethyl modified nucleotide with phosphorothioate linkage
  modified_base 5: mod_base = OTHER; note = 2'-O-methoxyethyl modified nucleotide with phosphorothioate linkage
  modified_base 6: mod_base = OTHER; note = Nucleotide with phosphorothioate linkage
  modified_base 7: mod_base = OTHER; note = Nucleotide with phosphorothioate linkage
  modified_base 8: mod_base = OTHER; note = Thymine with phosphorothioate linkage
  modified_base 9: mod_base = OTHER; note = Nucleotide with phosphorothioate linkage
  modified_base 10: mod_base = OTHER; note = Nucleotide with phosphorothioate linkage
  modified_base 11: mod_base = OTHER; note = 2'-O-methyl modified abasic nucleotide with phosphorothioate linkage
  modified_base 12: mod_base = OTHER; note = Nucleotide with phosphorothioate linkage
  modified_base 13: mod_base = OTHER; note = 5-methylcytosine with phosphorothioate linkage
  modified_base 14: mod_base = OTHER; note = Nucleotide with phosphorothioate linkage
  modified_base 15: mod_base = OTHER; note = Nucleotide with phosphorothioate linkage
  modified_base 16: mod_base = OTHER; note = 2'-O-methoxyethyl modified nucleotide with phosphorothioate linkage
  modified_base 17: mod_base = OTHER; note = Locked nucleic acid with phosphorothioate linkage
  modified_base 18: mod_base = OTHER; note = 2'-O-methoxyethyl modified thymine with phosphorothioate linkage
  modified_base 19: mod_base = OTHER; note = 2'-O-methoxyethyl modified nucleotide with phosphorothioate linkage
  modified_base 20: mod_base = OTHER; note = 2'-O-methoxyethyl 5-methylcytosine
  misc_feature 1..5: note = RNA
  misc_feature 6..10: note = DNA
  misc_feature 11: note = RNA
  misc_feature 12..15: note = DNA
  misc_feature 16..20: note = RNA
gcagaggtgangcgaagtgc

SEQ ID NO: 1035 - DNA, 20 bp, synthetic construct
  source 1..20: mol_type = other DNA
  modified_base 1: mod_base = OTHER; note = 2'-O-methoxyethyl modified nucleotide with phosphorothioate linkage
  modified_base 2: mod_base = OTHER; note = Locked 5-methylcytosine with phosphorothioate linkage
  modified_base 3: mod_base = OTHER; note = 2'-O-methoxyethyl modified nucleotide with phosphorothioate linkage
  modified_base 4: mod_base = OTHER; note = 2'-O-methoxyethyl modified nucleotide with phosphorothioate linkage
  modified_base 5: mod_base = OTHER; note = 2'-O-methoxyethyl modified nucleotide with phosphorothioate linkage
  modified_base 6: mod_base = OTHER; note = Nucleotide with phosphorothioate linkage
  modified_base 7: mod_base = OTHER; note = Nucleotide with phosphorothioate linkage
  modified_base 8: mod_base = OTHER; note = Thymine with phosphorothioate linkage
  modified_base 9: mod_base = OTHER; note = Nucleotide with phosphorothioate linkage
  modified_base 10: mod_base = OTHER; note = Nucleotide with phosphorothioate linkage
  modified_base 11: mod_base = OTHER; note = 2'-O-methyl modified abasic nucleotide with phosphorothioate linkage
  modified_base 12: mod_base = OTHER; note = Nucleotide with phosphorothioate linkage
  modified_base 13: mod_base = OTHER; note = 5-methylcytosine with phosphorothioate linkage
  modified_base 14: mod_base = OTHER; note = Nucleotide with phosphorothioate linkage
  modified_base 15: mod_base = OTHER; note = Nucleotide with phosphorothioate linkage
  modified_base 16: mod_base = OTHER; note = 2'-O-methoxyethyl modified nucleotide with phosphorothioate linkage
  modified_base 17: mod_base = OTHER; note = 2'-O-methoxyethyl modified nucleotide with phosphorothioate linkage
  modified_base 18: mod_base = OTHER; note = Locked thymine with phosphorothioate linkage
  modified_base 19: mod_base = OTHER; note = 2'-O-methoxyethyl modified nucleotide with phosphorothioate linkage
  modified_base 20: mod_base = OTHER; note = 2'-O-methoxyethyl 5-methylcytosine
  misc_feature 1..5: note = RNA
  misc_feature 6..10: note = DNA
  misc_feature 11: note = RNA
  misc_feature 12..15: note = DNA
  misc_feature 16..20: note = RNA
gcagaggtgangcgaagtgc

SEQ ID NO: 1036 - DNA, 20 bp, synthetic construct
  source 1..20: mol_type = other DNA
  modified_base 1: mod_base = OTHER; note = 2'-O-methoxyethyl modified nucleotide with phosphorothioate linkage
  modified_base 2: mod_base = OTHER; note = Locked 5-methylcytosine with phosphorothioate linkage
  modified_base 3: mod_base = OTHER; note = 2'-O-methoxyethyl modified nucleotide with phosphorothioate linkage
  modified_base 4: mod_base = OTHER; note = 2'-O-methoxyethyl modified nucleotide with phosphorothioate linkage
  modified_base 5: mod_base = OTHER; note = 2'-O-methoxyethyl modified nucleotide with phosphorothioate linkage
  modified_base 6: mod_base = OTHER; note = Nucleotide with phosphorothioate linkage
  modified_base 7: mod_base = OTHER; note = Nucleotide with phosphorothioate linkage
  modified_base 8: mod_base = OTHER; note = Thymine with phosphorothioate linkage
  modified_base 9: mod_base = OTHER; note = Nucleotide with phosphorothioate linkage
  modified_base 10: mod_base = OTHER; note = Nucleotide with phosphorothioate linkage
  modified_base 11: mod_base = OTHER; note = 2'-O-methyl modified abasic nucleotide with phosphorothioate linkage
  modified_base 12: mod_base = OTHER; note = Nucleotide with phosphorothioate linkage
  modified_base 13: mod_base = OTHER; note = 5-methylcytosine with phosphorothioate linkage
  modified_base 14: mod_base = OTHER; note = Nucleotide with phosphorothioate linkage
  modified_base 15: mod_base = OTHER; note = Nucleotide with phosphorothioate linkage
  modified_base 16: mod_base = OTHER; note = 2'-O-methoxyethyl modified nucleotide with phosphorothioate linkage
  modified_base 17: mod_base = OTHER; note = 2'-O-methoxyethyl modified nucleotide with phosphorothioate linkage
  modified_base 18: mod_base = OTHER; note = 2'-O-methoxyethyl modified thymine with phosphorothioate linkage
  modified_base 19: mod_base = OTHER; note = Locked nucleic acid with phosphorothioate linkage
  modified_base 20: mod_base = OTHER; note = 2'-O-methoxyethyl 5-methylcytosine
  misc_feature 1..5: note = RNA
  misc_feature 6..10: note = DNA
  misc_feature 11: note = RNA
  misc_feature 12..15: note = DNA
  misc_feature 16..20: note = RNA
gcagaggtgangcgaagtgc

SEQ ID NO: 1037 - DNA, 20 bp, synthetic construct
  source 1..20: mol_type = other DNA
  modified_base 1: mod_base = OTHER; note = 2'-O-methoxyethyl modified nucleotide with phosphorothioate linkage
  modified_base 2: mod_base = OTHER; note = Locked 5-methylcytosine with phosphorothioate linkage
  modified_base 3: mod_base = OTHER; note = 2'-O-methoxyethyl modified nucleotide with phosphorothioate linkage
  modified_base 4: mod_base = OTHER; note = 2'-O-methoxyethyl modified nucleotide with phosphorothioate linkage
  modified_base 5: mod_base = OTHER; note = 2'-O-methoxyethyl modified nucleotide with phosphorothioate linkage
  modified_base 6: mod_base = OTHER; note = Nucleotide with phosphorothioate linkage
  modified_base 7: mod_base = OTHER; note = Nucleotide with phosphorothioate linkage
  modified_base 8: mod_base = OTHER; note = Thymine with phosphorothioate linkage
  modified_base 9: mod_base = OTHER; note = Nucleotide with phosphorothioate linkage
  modified_base 10: mod_base = OTHER; note = Nucleotide with phosphorothioate linkage
  modified_base 11: mod_base = OTHER; note = 2'-O-methyl modified abasic nucleotide with phosphorothioate linkage
  modified_base 12: mod_base = OTHER; note = Nucleotide with phosphorothioate linkage
  modified_base 13: mod_base = OTHER; note = 5-methylcytosine with phosphorothioate linkage
  modified_base 14: mod_base = OTHER; note = Nucleotide with phosphorothioate linkage
  modified_base 15: mod_base = OTHER; note = Nucleotide with phosphorothioate linkage
  modified_base 16: mod_base = OTHER; note = 2'-O-methoxyethyl modified nucleotide with phosphorothioate linkage
  modified_base 17: mod_base = OTHER; note = 2'-O-methoxyethyl modified nucleotide with phosphorothioate linkage
  modified_base 18: mod_base = OTHER; note = 2'-O-methoxyethyl modified thymine with phosphorothioate linkage
  modified_base 19: mod_base = OTHER; note = 2'-O-methoxyethyl modified nucleotide with phosphorothioate linkage
  modified_base 20: mod_base = OTHER; note = Locked 5-methylcytosine
  misc_feature 1..5: note = RNA
  misc_feature 6..10: note = DNA
  misc_feature 11: note = RNA
  misc_feature 12..15: note = DNA
  misc_feature 16..20: note = RNA
gcagaggtgangcgaagtgc

SEQ ID NO: 1038 - DNA, 20 bp, synthetic construct
  source 1..20: mol_type = other DNA
  modified_base 1: mod_base = OTHER; note = 2'-O-methoxyethyl modified nucleotide with phosphorothioate linkage
  modified_base 2: mod_base = OTHER; note = 2'-O-methoxyethyl 5-methylcytosine with phosphorothioate linkage
  modified_base 3: mod_base = OTHER; note = Locked nucleic acid with phosphorothioate linkage
  modified_base 4: mod_base = OTHER; note = Locked nucleic acid with phosphorothioate linkage
  modified_base 5: mod_base = OTHER; note = 2'-O-methoxyethyl modified nucleotide with phosphorothioate linkage
  modified_base 6: mod_base = OTHER; note = Nucleotide with phosphorothioate linkage
  modified_base 7: mod_base = OTHER; note = Nucleotide with phosphorothioate linkage
  modified_base 8: mod_base = OTHER; note = Thymine with phosphorothioate linkage
  modified_base 9: mod_base = OTHER; note = Nucleotide with phosphorothioate linkage
  modified_base 10: mod_base = OTHER; note = Nucleotide with phosphorothioate linkage
  modified_base 11: mod_base = OTHER; note = 2'-O-methyl modified abasic nucleotide with phosphorothioate linkage
  modified_base 12: mod_base = OTHER; note = Nucleotide with phosphorothioate linkage
  modified_base 13: mod_base = OTHER; note = 5-methylcytosine with phosphorothioate linkage
  modified_base 14: mod_base = OTHER; note = Nucleotide with phosphorothioate linkage
  modified_base 15: mod_base = OTHER; note = Nucleotide with phosphorothioate linkage
  modified_base 16: mod_base = OTHER; note = 2'-O-methoxyethyl modified nucleotide with phosphorothioate linkage
  modified_base 17: mod_base = OTHER; note = 2'-O-methoxyethyl modified nucleotide with phosphorothioate linkage
  modified_base 18: mod_base = OTHER; note = 2'-O-methoxyethyl modified thymine with phosphorothioate linkage
  modified_base 19: mod_base = OTHER; note = 2'-O-methoxyethyl modified nucleotide with phosphorothioate linkage
  modified_base 20: mod_base = OTHER; note = 2'-O-methoxyethyl 5-methylcytosine
  misc_feature 1..5: note = RNA
  misc_feature 6..10: note = DNA
  misc_feature 11: note = RNA
  misc_feature 12..15: note = DNA
  misc_feature 16..20: note = RNA
gcagaggtgangcgaagtgc

SEQ ID NO: 1039 - DNA, 20 bp, synthetic construct
  source 1..20: mol_type = other DNA
  modified_base 1: mod_base = OTHER; note = 2'-O-methoxyethyl modified nucleotide with phosphorothioate linkage
  modified_base 2: mod_base = OTHER; note = 2'-O-methoxyethyl 5-methylcytosine with phosphorothioate linkage
  modified_base 3: mod_base = OTHER; note = Locked nucleic acid with phosphorothioate linkage
  modified_base 4: mod_base = OTHER; note = 2'-O-methoxyethyl modified nucleotide with phosphorothioate linkage
  modified_base 5: mod_base = OTHER; note = 2'-O-methoxyethyl modified nucleotide with phosphorothioate linkage
  modified_base 6: mod_base = OTHER; note = Nucleotide with phosphorothioate linkage
  modified_base 7: mod_base = OTHER; note = Nucleotide with phosphorothioate linkage
  modified_base 8: mod_base = OTHER; note = Thymine with phosphorothioate linkage
  modified_base 9: mod_base = OTHER; note = Nucleotide with phosphorothioate linkage
  modified_base 10: mod_base = OTHER; note = Nucleotide with phosphorothioate linkage
  modified_base 11: mod_base = OTHER; note = 2'-O-methyl modified abasic nucleotide with phosphorothioate linkage
  modified_base 12: mod_base = OTHER; note = Nucleotide with phosphorothioate linkage
  modified_base 13: mod_base = OTHER; note = 5-methylcytosine with phosphorothioate linkage
  modified_base 14: mod_base = OTHER; note = Nucleotide with phosphorothioate linkage
  modified_base 15: mod_base = OTHER; note = Nucleotide with phosphorothioate linkage
  modified_base 16: mod_base = OTHER; note = Locked nucleic acid with phosphorothioate linkage
  modified_base 17: mod_base = OTHER; note = 2'-O-methoxyethyl modified nucleotide with phosphorothioate linkage
  modified_base 18: mod_base = OTHER; note = 2'-O-methoxyethyl modified thymine with phosphorothioate linkage
  modified_base 19: mod_base = OTHER; note = 2'-O-methoxyethyl modified nucleotide with phosphorothioate linkage
  modified_base 20: mod_base = OTHER; note = 2'-O-methoxyethyl 5-methylcytosine
  misc_feature 1..5: note = RNA
  misc_feature 6..10: note = DNA
  misc_feature 11: note = RNA
  misc_feature 12..15: note = DNA
  misc_feature 16..20: note = RNA
gcagaggtgangcgaagtgc

SEQ ID NO: 1040 - DNA, 20 bp, synthetic construct
  source 1..20: mol_type = other DNA
  modified_base 1: mod_base = OTHER; note = 2'-O-methoxyethyl modified nucleotide with phosphorothioate linkage
  modified_base 2: mod_base = OTHER; note = 2'-O-methoxyethyl 5-methylcytosine with phosphorothioate linkage
  modified_base 3: mod_base = OTHER; note = Locked nucleic acid with phosphorothioate linkage
  modified_base 4: mod_base = OTHER; note = 2'-O-methoxyethyl modified nucleotide with phosphorothioate linkage
  modified_base 5: mod_base = OTHER; note = 2'-O-methoxyethyl modified nucleotide with phosphorothioate linkage
  modified_base 6: mod_base = OTHER; note = Nucleotide with phosphorothioate linkage
  modified_base 7: mod_base = OTHER; note = Nucleotide with phosphorothioate linkage
  modified_base 8: mod_base = OTHER; note = Thymine with phosphorothioate linkage
  modified_base 9: mod_base = OTHER; note = Nucleotide with phosphorothioate linkage
  modified_base 10: mod_base = OTHER; note = Nucleotide with phosphorothioate linkage
  modified_base 11: mod_base = OTHER; note = 2'-O-methyl modified abasic nucleotide with phosphorothioate linkage
  modified_base 12: mod_base = OTHER; note = Nucleotide with phosphorothioate linkage
  modified_base 13: mod_base = OTHER; note = 5-methylcytosine with phosphorothioate linkage
  modified_base 14: mod_base = OTHER; note = Nucleotide with phosphorothioate linkage
  modified_base 15: mod_base = OTHER; note = Nucleotide with phosphorothioate linkage
  modified_base 16: mod_base = OTHER; note = 2'-O-methoxyethyl modified nucleotide with phosphorothioate linkage
  modified_base 17: mod_base = OTHER; note = Locked nucleic acid with phosphorothioate linkage
  modified_base 18: mod_base = OTHER; note = 2'-O-methoxyethyl modified thymine with phosphorothioate linkage
  modified_base 19: mod_base = OTHER; note = 2'-O-methoxyethyl modified nucleotide with phosphorothioate linkage
  modified_base 20: mod_base = OTHER; note = 2'-O-methoxyethyl 5-methylcytosine
  misc_feature 1..5: note = RNA
  misc_feature 6..10: note = DNA
  misc_feature 11: note = RNA
  misc_feature 12..15: note = DNA
  misc_feature 16..20: note = RNA
gcagaggtgangcgaagtgc

SEQ ID NO: 1041 - DNA, 20 bp, synthetic construct
  source 1..20: mol_type = other DNA
  modified_base 1: mod_base = OTHER; note = 2'-O-methoxyethyl modified nucleotide with phosphorothioate linkage
  modified_base 2: mod_base = OTHER; note = 2'-O-methoxyethyl 5-methylcytosine with phosphorothioate linkage
  modified_base 3: mod_base = OTHER; note = Locked nucleic acid with phosphorothioate linkage
  modified_base 4: mod_base = OTHER; note = 2'-O-methoxyethyl modified nucleotide with phosphorothioate linkage
  modified_base 5: mod_base = OTHER; note = 2'-O-methoxyethyl modified nucleotide with phosphorothioate linkage
  modified_base 6: mod_base = OTHER; note = Nucleotide with phosphorothioate linkage
  modified_base 7: mod_base = OTHER; note = Nucleotide with phosphorothioate linkage
  modified_base 8: mod_base = OTHER; note = Thymine with phosphorothioate linkage
  modified_base 9: mod_base = OTHER; note = Nucleotide with phosphorothioate linkage
  modified_base 10: mod_base = OTHER; note = Nucleotide with phosphorothioate linkage
  modified_base 11: mod_base = OTHER; note = 2'-O-methyl modified abasic nucleotide with phosphorothioate linkage
  modified_base 12: mod_base = OTHER; note = Nucleotide with phosphorothioate linkage
  modified_base 13: mod_base = OTHER; note = 5-methylcytosine with phosphorothioate linkage
  modified_base 14: mod_base = OTHER; note = Nucleotide with phosphorothioate linkage
  modified_base 15: mod_base = OTHER; note = Nucleotide with phosphorothioate linkage
  modified_base 16: mod_base = OTHER; note = 2'-O-methoxyethyl modified nucleotide with phosphorothioate linkage
  modified_base 17: mod_base = OTHER; note = 2'-O-methoxyethyl modified nucleotide with phosphorothioate linkage
  modified_base 18: mod_base = OTHER; note = Locked thymine with phosphorothioate linkage
  modified_base 19: mod_base = OTHER; note = 2'-O-methoxyethyl modified nucleotide with phosphorothioate linkage
  modified_base 20: mod_base = OTHER; note = 2'-O-methoxyethyl 5-methylcytosine
  misc_feature 1..5: note = RNA
  misc_feature 6..10: note = DNA
  misc_feature 11: note = RNA
  misc_feature 12..15: note = DNA
  misc_feature 16..20: note = RNA
gcagaggtgangcgaagtgc

SEQ ID NO: 1042 - DNA, 20 bp, synthetic construct
  source 1..20: mol_type = other DNA
  modified_base 1: mod_base = OTHER; note = 2'-O-methoxyethyl modified nucleotide with phosphorothioate linkage
  modified_base 2: mod_base = OTHER; note = 2'-O-methoxyethyl 5-methylcytosine with phosphorothioate linkage
  modified_base 3: mod_base = OTHER; note = Locked nucleic acid with phosphorothioate linkage
  modified_base 4: mod_base = OTHER; note = 2'-O-methoxyethyl modified nucleotide with phosphorothioate linkage
  modified_base 5: mod_base = OTHER; note = 2'-O-methoxyethyl modified nucleotide with phosphorothioate linkage
  modified_base 6: mod_base = OTHER; note = Nucleotide with phosphorothioate linkage
  modified_base 7: mod_base = OTHER; note = Nucleotide with phosphorothioate linkage
  modified_base 8: mod_base = OTHER; note = Thymine with phosphorothioate linkage
  modified_base 9: mod_base = OTHER; note = Nucleotide with phosphorothioate linkage
  modified_base 10: mod_base = OTHER; note = Nucleotide with phosphorothioate linkage
  modified_base 11: mod_base = OTHER; note = 2'-O-methyl modified abasic nucleotide with phosphorothioate linkage
  modified_base 12: mod_base = OTHER; note = Nucleotide with phosphorothioate linkage
  modified_base 13: mod_base = OTHER; note = 5-methylcytosine with phosphorothioate linkage
  modified_base 14: mod_base = OTHER; note = Nucleotide with phosphorothioate linkage
  modified_base 15: mod_base = OTHER; note = Nucleotide with phosphorothioate linkage
  modified_base 16: mod_base = OTHER; note = 2'-O-methoxyethyl modified nucleotide with phosphorothioate linkage
  modified_base 17: mod_base = OTHER; note = 2'-O-methoxyethyl modified nucleotide with phosphorothioate linkage
  modified_base 18: mod_base = OTHER; note = 2'-O-methoxyethyl modified thymine with phosphorothioate linkage
  modified_base 19: mod_base = OTHER; note = Locked nucleic acid with phosphorothioate linkage
  modified_base 20: mod_base = OTHER; note = 2'-O-methoxyethyl 5-methylcytosine
  misc_feature 1..5: note = RNA
  misc_feature 6..10: note = DNA
  misc_feature 11: note = RNA
  misc_feature 12..15: note = DNA
  misc_feature 16..20: note = RNA
gcagaggtgangcgaagtgc

SEQ ID NO: 1043 - DNA, 20 bp, synthetic construct
  source 1..20: mol_type = other DNA
  modified_base 1: mod_base = OTHER; note = 2'-O-methoxyethyl modified nucleotide with phosphorothioate linkage
  modified_base 2: mod_base = OTHER; note = 2'-O-methoxyethyl 5-methylcytosine with phosphorothioate linkage
  modified_base 3: mod_base = OTHER; note = Locked nucleic acid with phosphorothioate linkage
  modified_base 4: mod_base = OTHER; note = 2'-O-methoxyethyl modified nucleotide with phosphorothioate linkage
  modified_base 5: mod_base = OTHER; note = 2'-O-methoxyethyl modified nucleotide with phosphorothioate linkage
  modified_base 6: mod_base = OTHER; note = Nucleotide with phosphorothioate linkage
  modified_base 7: mod_base = OTHER; note = Nucleotide with phosphorothioate linkage
  modified_base 8: mod_base = OTHER; note = Thymine with phosphorothioate linkage
  modified_base 9: mod_base = OTHER; note = Nucleotide with phosphorothioate linkage
  modified_base 10: mod_base = OTHER; note = Nucleotide with phosphorothioate linkage
  modified_base 11: mod_base = OTHER; note = 2'-O-methyl modified abasic nucleotide with phosphorothioate linkage
  modified_base 12: mod_base = OTHER; note = Nucleotide with phosphorothioate linkage
  modified_base 13: mod_base = OTHER; note = 5-methylcytosine with phosphorothioate linkage
  modified_base 14: mod_base = OTHER; note = Nucleotide with phosphorothioate linkage
  modified_base 15: mod_base = OTHER; note = Nucleotide with phosphorothioate linkage
  modified_base 16: mod_base = OTHER; note = 2'-O-methoxyethyl modified nucleotide with phosphorothioate linkage
  modified_base 17: mod_base = OTHER; note = 2'-O-methoxyethyl modified nucleotide with phosphorothioate linkage
  modified_base 18: mod_base = OTHER; note = 2'-O-methoxyethyl modified thymine with phosphorothioate linkage
  modified_base 19: mod_base = OTHER; note = 2'-O-methoxyethyl modified nucleotide with phosphorothioate linkage
  modified_base 20: mod_base = OTHER; note = Locked 5-methylcytosine
  misc_feature 1..5: note = RNA
  misc_feature 6..10: note = DNA
  misc_feature 11: note = RNA
  misc_feature 12..15: note = DNA
  misc_feature 16..20: note = RNA
gcagaggtgangcgaagtgc

SEQ ID NO: 1044 - DNA, 20 bp, synthetic construct
  source 1..20: mol_type = other DNA
  modified_base 1: mod_base = OTHER; note = 2'-O-methoxyethyl modified nucleotide with phosphorothioate linkage
  modified_base 2: mod_base = OTHER; note = 2'-O-methoxyethyl 5-methylcytosine with phosphorothioate linkage
  modified_base 3: mod_base = OTHER; note = 2'-O-methoxyethyl modified nucleotide with phosphorothioate linkage
  modified_base 4: mod_base = OTHER; note = Locked nucleic acid with phosphorothioate linkage
  modified_base 5: mod_base = OTHER; note = 2'-O-methoxyethyl modified nucleotide with phosphorothioate linkage
  modified_base 6: mod_base = OTHER; note = Nucleotide with phosphorothioate linkage
  modified_base 7: mod_base = OTHER; note = Nucleotide with phosphorothioate linkage
  modified_base 8: mod_base = OTHER; note = Thymine with phosphorothioate linkage
  modified_base 9: mod_base = OTHER; note = Nucleotide with phosphorothioate linkage
  modified_base 10: mod_base = OTHER; note = Nucleotide with phosphorothioate linkage
  modified_base 11: mod_base = OTHER; note = 2'-O-methyl modified abasic nucleotide with phosphorothioate linkage
  modified_base 12: mod_base = OTHER; note = Nucleotide with phosphorothioate linkage
  modified_base 13: mod_base = OTHER; note = 5-methylcytosine with phosphorothioate linkage
  modified_base 14: mod_base = OTHER; note = Nucleotide with phosphorothioate linkage
  modified_base 15: mod_base = OTHER; note = Nucleotide with phosphorothioate linkage
  modified_base 16: mod_base = OTHER; note = 2'-O-methoxyethyl modified nucleotide with phosphorothioate linkage
  modified_base 17: mod_base = OTHER; note = Locked nucleic acid with phosphorothioate linkage
  modified_base 18: mod_base = OTHER; note = 2'-O-methoxyethyl modified thymine with phosphorothioate linkage
  modified_base 19: mod_base = OTHER; note = 2'-O-methoxyethyl modified nucleotide with phosphorothioate linkage
  modified_base 20: mod_base = OTHER; note = 2'-O-methoxyethyl 5-methylcytosine
  misc_feature 1..5: note = RNA
  misc_feature 6..10: note = DNA
  misc_feature 11: note = RNA
  misc_feature 12..15: note = DNA
  misc_feature 16..20: note = RNA
gcagaggtgangcgaagtgc

SEQ ID NO: 1045 - DNA, 20 bp, synthetic construct
  source 1..20: mol_type = other DNA
  modified_base 1: mod_base = OTHER; note = 2'-O-methoxyethyl modified nucleotide with phosphorothioate linkage
  modified_base 2: mod_base = OTHER; note = 2'-O-methoxyethyl 5-methylcytosine with phosphorothioate linkage
  modified_base 3: mod_base = OTHER; note = 2'-O-methoxyethyl modified nucleotide with phosphorothioate linkage
  modified_base 4: mod_base = OTHER; note = Locked nucleic acid with phosphorothioate linkage
  modified_base 5: mod_base = OTHER; note = 2'-O-methoxyethyl modified nucleotide with phosphorothioate linkage
  modified_base 6: mod_base = OTHER; note = Nucleotide with phosphorothioate linkage
  modified_base 7: mod_base = OTHER; note = Nucleotide with phosphorothioate linkage
  modified_base 8: mod_base = OTHER; note = Thymine with phosphorothioate linkage
  modified_base 9: mod_base = OTHER; note = Nucleotide with phosphorothioate linkage
  modified_base 10: mod_base = OTHER; note = Nucleotide with phosphorothioate linkage
  modified_base 11: mod_base = OTHER; note = 2'-O-methyl modified abasic nucleotide with phosphorothioate linkage
  modified_base 12: mod_base = OTHER; note = Nucleotide with phosphorothioate linkage
  modified_base 13: mod_base = OTHER; note = 5-methylcytosine with phosphorothioate linkage
  modified_base 14: mod_base = OTHER; note = Nucleotide with phosphorothioate linkage
  modified_base 15: mod_base = OTHER; note = Nucleotide with phosphorothioate linkage
  modified_base 16: mod_base = OTHER; note = 2'-O-methoxyethyl modified nucleotide with phosphorothioate linkage
  modified_base 17: mod_base = OTHER; note = 2'-O-methoxyethyl modified nucleotide with phosphorothioate linkage
  modified_base 18: mod_base = OTHER; note = Locked thymine with phosphorothioate linkage
  modified_base 19: mod_base = OTHER; note = 2'-O-methoxyethyl modified nucleotide with phosphorothioate linkage
  modified_base 20: mod_base = OTHER; note = 2'-O-methoxyethyl 5-methylcytosine
  misc_feature 1..5: note = RNA
  misc_feature 6..10: note = DNA
  misc_feature 11: note = RNA
  misc_feature 12..15: note = DNA
  misc_feature 16..20: note = RNA
gcagaggtgangcgaagtgc

SEQ ID NO: 1046 - DNA, 20 bp, synthetic construct
  source 1..20: mol_type = other DNA
  modified_base 1: mod_base = OTHER; note = 2'-O-methoxyethyl modified nucleotide with phosphorothioate linkage
  modified_base 2: mod_base = OTHER; note = 2'-O-methoxyethyl 5-methylcytosine with phosphorothioate linkage
  modified_base 3: mod_base = OTHER; note = 2'-O-methoxyethyl modified nucleotide with phosphorothioate linkage
  modified_base 4: mod_base = OTHER; note = Locked nucleic acid with phosphorothioate linkage
  modified_base 5: mod_base = OTHER; note = 2'-O-methoxyethyl modified nucleotide with phosphorothioate linkage
  modified_base 6: mod_base = OTHER; note = Nucleotide with phosphorothioate linkage
  modified_base 7: mod_base = OTHER; note = Nucleotide with phosphorothioate linkage
  modified_base 8: mod_base = OTHER; note = Thymine with phosphorothioate linkage
  modified_base 9: mod_base = OTHER; note = Nucleotide with phosphorothioate linkage
  modified_base 10: mod_base = OTHER; note = Nucleotide with phosphorothioate linkage
  modified_base 11: mod_base = OTHER; note = 2'-O-methyl modified abasic nucleotide with phosphorothioate linkage
  modified_base 12: mod_base = OTHER; note = Nucleotide with phosphorothioate linkage
  modified_base 13: mod_base = OTHER; note = 5-methylcytosine with phosphorothioate linkage
  modified_base 14: mod_base = OTHER; note = Nucleotide with phosphorothioate linkage
  modified_base 15: mod_base = OTHER; note = Nucleotide with phosphorothioate linkage
  modified_base 16: mod_base = OTHER; note = 2'-O-methoxyethyl modified nucleotide with phosphorothioate linkage
  modified_base 17: mod_base = OTHER; note = 2'-O-methoxyethyl modified nucleotide with phosphorothioate linkage
  modified_base 18: mod_base = OTHER; note = 2'-O-methoxyethyl modified thymine with phosphorothioate linkage
  modified_base 19: mod_base = OTHER; note = Locked nucleic acid with phosphorothioate linkage
  modified_base 20: mod_base = OTHER; note = 2'-O-methoxyethyl 5-methylcytosine
  misc_feature 1..5: note = RNA
  misc_feature 6..10: note = DNA
  misc_feature 11: note = RNA
  misc_feature 12..15: note = DNA
  misc_feature 16..20: note = RNA
gcagaggtgangcgaagtgc

SEQ ID NO: 1047 - DNA, 20 bp, synthetic construct
  source 1..20: mol_type = other DNA
  modified_base 1: mod_base = OTHER; note = 2'-O-methoxyethyl modified nucleotide with phosphorothioate linkage
  modified_base 2: mod_base = OTHER; note = 2'-O-methoxyethyl 5-methylcytosine with phosphorothioate linkage
  modified_base 3: mod_base = OTHER; note = 2'-O-methoxyethyl modified nucleotide with phosphorothioate linkage
  modified_base 4: mod_base = OTHER; note = Locked nucleic acid with phosphorothioate linkage
  modified_base 5: mod_base = OTHER; note = 2'-O-methoxyethyl modified nucleotide with phosphorothioate linkage
  modified_base 6: mod_base = OTHER; note = Nucleotide with phosphorothioate linkage
  modified_base 7: mod_base = OTHER; note = Nucleotide with phosphorothioate linkage
  modified_base 8: mod_base = OTHER; note = Thymine with phosphorothioate linkage
  modified_base 9: mod_base = OTHER; note = Nucleotide with phosphorothioate linkage
  modified_base 10: mod_base = OTHER; note = Nucleotide with phosphorothioate linkage
  modified_base 11: mod_base = OTHER; note = 2'-O-methyl modified abasic nucleotide with phosphorothioate linkage
  modified_base 12: mod_base = OTHER; note = Nucleotide with phosphorothioate linkage
  modified_base 13: mod_base = OTHER; note = 5-methylcytosine with phosphorothioate linkage
  modified_base 14: mod_base = OTHER; note = Nucleotide with phosphorothioate linkage
  modified_base 15: mod_base = OTHER; note = Nucleotide with phosphorothioate linkage
  modified_base 16: mod_base = OTHER; note = 2'-O-methoxyethyl modified nucleotide with phosphorothioate linkage
  modified_base 17: mod_base = OTHER; note = 2'-O-methoxyethyl modified nucleotide with phosphorothioate linkage
  modified_base 18: mod_base = OTHER; note = 2'-O-methoxyethyl modified thymine with phosphorothioate linkage
  modified_base 19: mod_base = OTHER; note = 2'-O-methoxyethyl modified nucleotide with phosphorothioate linkage
  modified_base 20: mod_base = OTHER; note = Locked 5-methylcytosine
  misc_feature 1..5: note = RNA
  misc_feature 6..10: note = DNA
  misc_feature 11: note = RNA
  misc_feature 12..15: note = DNA
  misc_feature 16..20: note = RNA
gcagaggtgangcgaagtgc

SEQ ID NO: 1048 - DNA, 20 bp, synthetic construct
  source 1..20: mol_type = other DNA
  modified_base 1: mod_base = OTHER; note = 2'-O-methoxyethyl modified nucleotide with phosphorothioate linkage
  modified_base 2: mod_base = OTHER; note = 2'-O-methoxyethyl 5-methylcytosine with phosphorothioate linkage
  modified_base 3: mod_base = OTHER; note = 2'-O-methoxyethyl modified nucleotide with phosphorothioate linkage
  modified_base 4: mod_base = OTHER; note = 2'-O-methoxyethyl modified nucleotide with phosphorothioate linkage
  modified_base 5: mod_base = OTHER; note = Locked nucleic acid with phosphorothioate linkage
  modified_base 6: mod_base = OTHER; note = Nucleotide with phosphorothioate linkage
  modified_base 7: mod_base = OTHER; note = Nucleotide with phosphorothioate linkage
  modified_base 8: mod_base = OTHER; note = Thymine with phosphorothioate linkage
  modified_base 9: mod_base = OTHER; note = Nucleotide with phosphorothioate linkage
  modified_base 10: mod_base = OTHER; note = Nucleotide with phosphorothioate linkage
  modified_base 11: mod_base = OTHER; note = 2'-O-methyl modified abasic nucleotide with phosphorothioate linkage
  modified_base 12: mod_base = OTHER; note = Nucleotide with phosphorothioate linkage
  modified_base 13: mod_base = OTHER; note = 5-methylcytosine with phosphorothioate linkage
  modified_base 14: mod_base = OTHER; note = Nucleotide with phosphorothioate linkage
  modified_base 15: mod_base = OTHER; note = Nucleotide with phosphorothioate linkage
  modified_base 16: mod_base = OTHER; note = 2'-O-methoxyethyl modified nucleotide with phosphorothioate linkage
  modified_base 17: mod_base = OTHER; note = Locked nucleic acid with phosphorothioate linkage
  modified_base 18: mod_base = OTHER; note = 2'-O-methoxyethyl modified thymine with phosphorothioate linkage
  modified_base 19: mod_base = OTHER; note = 2'-O-methoxyethyl modified nucleotide with phosphorothioate linkage
  modified_base 20: mod_base = OTHER; note = 2'-O-methoxyethyl 5-methylcytosine
  misc_feature 1..5: note = RNA
  misc_feature 6..10: note = DNA
  misc_feature 11: note = RNA
  misc_feature 12..15: note = DNA
  misc_feature 16..20: note = RNA
gcagaggtgangcgaagtgc

SEQ ID NO: 1049 - DNA, 20 bp, synthetic construct
  source 1..20: mol_type = other DNA
  modified_base 1: mod_base = OTHER; note = 2'-O-methoxyethyl modified nucleotide with phosphorothioate linkage
  modified_base 2: mod_base = OTHER; note = 2'-O-methoxyethyl 5-methylcytosine with phosphorothioate linkage
  modified_base 3: mod_base = OTHER; note = 2'-O-methoxyethyl modified nucleotide with phosphorothioate linkage
  modified_base 4: mod_base = OTHER; note = 2'-O-methoxyethyl modified nucleotide with phosphorothioate linkage
  modified_base 5: mod_base = OTHER; note = Locked nucleic acid with phosphorothioate linkage
  modified_base 6: mod_base = OTHER; note = Nucleotide with phosphorothioate linkage
  modified_base 7: mod_base = OTHER; note = Nucleotide with phosphorothioate linkage
  modified_base 8: mod_base = OTHER; note = Thymine with phosphorothioate linkage
  modified_base 9: mod_base = OTHER; note = Nucleotide with phosphorothioate linkage
  modified_base 10: mod_base = OTHER; note = Nucleotide with phosphorothioate linkage
  modified_base 11: mod_base = OTHER; note = 2'-O-methyl modified abasic nucleotide with phosphorothioate linkage
  modified_base 12: mod_base = OTHER; note = Nucleotide with phosphorothioate linkage
  modified_base 13: mod_base = OTHER; note = 5-methylcytosine with phosphorothioate linkage
  modified_base 14: mod_base = OTHER; note = Nucleotide with phosphorothioate linkage
  modified_base 15: mod_base = OTHER; note = Nucleotide with phosphorothioate linkage
  modified_base 16: mod_base = OTHER; note = 2'-O-methoxyethyl modified nucleotide with phosphorothioate linkage
  modified_base 17: mod_base = OTHER; note = 2'-O-methoxyethyl modified nucleotide with phosphorothioate linkage
  modified_base 18: mod_base = OTHER; note = Locked thymine with phosphorothioate linkage
  modified_base 19: mod_base = OTHER; note = 2'-O-methoxyethyl modified nucleotide with phosphorothioate linkage
  modified_base 20: mod_base = OTHER; note = 2'-O-methoxyethyl 5-methylcytosine
  misc_feature 1..5: note = RNA
  misc_feature 6..10: note = DNA
  misc_feature 11: note = RNA
  misc_feature 12..15: note = DNA
  misc_feature 16..20: note = RNA
gcagaggtgangcgaagtgc

SEQ ID NO: 1050 - DNA, 20 bp, synthetic construct
  source 1..20: mol_type = other DNA
  modified_base 1: mod_base = OTHER; note = 2'-O-methoxyethyl modified nucleotide with phosphorothioate linkage
  modified_base 2: mod_base = OTHER; note = 2'-O-methoxyethyl 5-methylcytosine with phosphorothioate linkage
  modified_base 3: mod_base = OTHER; note = 2'-O-methoxyethyl modified nucleotide with phosphorothioate linkage
  modified_base 4: mod_base = OTHER; note = 2'-O-methoxyethyl modified nucleotide with phosphorothioate linkage
  modified_base 5: mod_base = OTHER; note = Locked nucleic acid with phosphorothioate linkage
  modified_base 6: mod_base = OTHER; note = Nucleotide with phosphorothioate linkage
  modified_base 7: mod_base = OTHER; note = Nucleotide with phosphorothioate linkage
  modified_base 8: mod_base = OTHER; note = Thymine with phosphorothioate linkage
  modified_base 9: mod_base = OTHER; note = Nucleotide with phosphorothioate linkage
  modified_base 10: mod_base = OTHER; note = Nucleotide with phosphorothioate linkage
  modified_base 11: mod_base = OTHER; note = 2'-O-methyl modified abasic nucleotide with phosphorothioate linkage
  modified_base 12: mod_base = OTHER; note = Nucleotide with phosphorothioate linkage
  modified_base 13: mod_base = OTHER; note = 5-methylcytosine with phosphorothioate linkage
  modified_base 14: mod_base = OTHER; note = Nucleotide with phosphorothioate linkage
  modified_base 15: mod_base = OTHER; note = Nucleotide with phosphorothioate linkage
  modified_base 16: mod_base = OTHER; note = 2'-O-methoxyethyl modified nucleotide with phosphorothioate linkage
  modified_base 17: mod_base = OTHER; note = 2'-O-methoxyethyl modified nucleotide with phosphorothioate linkage
  modified_base 18: mod_base = OTHER; note = 2'-O-methoxyethyl modified thymine with phosphorothioate linkage
  modified_base 19: mod_base = OTHER; note = 2'-O-methoxyethyl modified nucleotide with phosphorothioate linkage
  modified_base 20: mod_base = OTHER; note = Locked 5-methylcytosine
  misc_feature 1..5: note = RNA
  misc_feature 6..10: note = DNA
  misc_feature 11: note = RNA
  misc_feature 12..15: note = DNA
  misc_feature 16..20: note = RNA
gcagaggtgangcgaagtgc

SEQ ID NO: 1051 - DNA, 20 bp, synthetic construct
  source 1..20: mol_type = other DNA
  modified_base 1: mod_base = OTHER; note = 2'-O-methoxyethyl modified nucleotide with phosphorothioate linkage
  modified_base 2: mod_base = OTHER; note = 2'-O-methoxyethyl 5-methylcytosine with phosphorothioate linkage
  modified_base 3: mod_base = OTHER; note = 2'-O-methoxyethyl modified nucleotide with phosphorothioate linkage
  modified_base 4: mod_base = OTHER; note = 2'-O-methoxyethyl modified nucleotide with phosphorothioate linkage
  modified_base 5: mod_base = OTHER; note = 2'-O-methoxyethyl modified nucleotide with phosphorothioate linkage
  modified_base 6: mod_base = OTHER; note = Nucleotide with phosphorothioate linkage
  modified_base 7: mod_base = OTHER; note = Nucleotide with phosphorothioate linkage
  modified_base 8: mod_base = OTHER; note = Thymine with phosphorothioate linkage
  modified_base 9: mod_base = OTHER; note = Nucleotide with phosphorothioate linkage
  modified_base 10: mod_base = OTHER; note = Nucleotide with phosphorothioate linkage
  modified_base 11: mod_base = OTHER; note = 2'-O-methyl modified abasic nucleotide with phosphorothioate linkage
  modified_base 12: mod_base = OTHER; note = Nucleotide with phosphorothioate linkage
  modified_base 13: mod_base = OTHER; note = 5-methylcytosine with phosphorothioate linkage
  modified_base 14: mod_base = OTHER; note = Nucleotide with phosphorothioate linkage
  modified_base 15: mod_base = OTHER; note = Nucleotide with phosphorothioate linkage
  modified_base 16: mod_base = OTHER; note = Locked nucleic acid with phosphorothioate linkage
  modified_base 17: mod_base = OTHER; note = Locked nucleic acid with phosphorothioate linkage
  modified_base 18: mod_base = OTHER; note = 2'-O-methoxyethyl modified thymine with phosphorothioate linkage
  modified_base 19: mod_base = OTHER; note = 2'-O-methoxyethyl modified nucleotide with phosphorothioate linkage
  modified_base 20: mod_base = OTHER; note = 2'-O-methoxyethyl 5-methylcytosine
  misc_feature 1..5: note = RNA
  misc_feature 6..10: note = DNA
  misc_feature 11: note = RNA
  misc_feature 12..15: note = DNA
  misc_feature 16..20: note = RNA
gcagaggtgangcgaagtgc

SEQ ID NO: 1052 - DNA, 20 bp, synthetic construct
  source 1..20: mol_type = other DNA
  modified_base 1: mod_base = OTHER; note = 2'-O-methoxyethyl modified nucleotide with phosphorothioate linkage
  modified_base 2: mod_base = OTHER; note = 2'-O-methoxyethyl 5-methylcytosine with phosphorothioate linkage
  modified_base 3: mod_base = OTHER; note = 2'-O-methoxyethyl modified nucleotide with phosphorothioate linkage
  modified_base 4: mod_base = OTHER; note = 2'-O-methoxyethyl modified nucleotide with phosphorothioate linkage
  modified_base 5: mod_base = OTHER; note = 2'-O-methoxyethyl modified nucleotide with phosphorothioate linkage
  modified_base 6: mod_base = OTHER; note = Nucleotide with phosphorothioate linkage
  modified_base 7: mod_base = OTHER; note = Nucleotide with phosphorothioate linkage
  modified_base 8: mod_base = OTHER; note = Thymine with phosphorothioate linkage
  modified_base 9: mod_base = OTHER; note = Nucleotide with phosphorothioate linkage
  modified_base 10: mod_base = OTHER; note = Nucleotide with phosphorothioate linkage
  modified_base 11: mod_base = OTHER; note = 2'-O-methyl modified abasic nucleotide with phosphorothioate linkage
  modified_base 12: mod_base = OTHER; note = Nucleotide with phosphorothioate linkage
  modified_base 13: mod_base = OTHER; note = 5-methylcytosine with phosphorothioate linkage
  modified_base 14: mod_base = OTHER; note = Nucleotide with phosphorothioate linkage
  modified_base 15: mod_base = OTHER; note = Nucleotide with phosphorothioate linkage
  modified_base 16: mod_base = OTHER; note = Locked nucleic acid with phosphorothioate linkage
  modified_base 17: mod_base = OTHER; note = 2'-O-methoxyethyl modified nucleotide with phosphorothioate linkage
  modified_base 18: mod_base = OTHER; note = 2'-O-methoxyethyl modified thymine with phosphorothioate linkage
  modified_base 19: mod_base = OTHER; note = Locked nucleic acid with phosphorothioate linkage
  modified_base 20: mod_base = OTHER; note = 2'-O-methoxyethyl 5-methylcytosine
  misc_feature 1..5: note = RNA
  misc_feature 6..10: note = DNA
  misc_feature 11: note = RNA
  misc_feature 12..15: note = DNA
  misc_feature 16..20: note = RNA
gcagaggtgangcgaagtgc

SEQ ID NO: 1053 - DNA, 20 bp, synthetic construct
  source 1..20: mol_type = other DNA
  modified_base 1: mod_base = OTHER; note = 2'-O-methoxyethyl modified nucleotide with phosphorothioate linkage
  modified_base 2: mod_base = OTHER; note = 2'-O-methoxyethyl 5-methylcytosine with phosphorothioate linkage
  modified_base 3: mod_base = OTHER; note = 2'-O-methoxyethyl modified nucleotide with phosphorothioate linkage
  modified_base 4: mod_base = OTHER; note = 2'-O-methoxyethyl modified nucleotide with phosphorothioate linkage
  modified_base 5: mod_base = OTHER; note = 2'-O-methoxyethyl modified nucleotide with phosphorothioate linkage
  modified_base 6: mod_base = OTHER; note = Nucleotide with phosphorothioate linkage
  modified_base 7: mod_base = OTHER; note = Nucleotide with phosphorothioate linkage
  modified_base 8: mod_base = OTHER; note = Thymine with phosphorothioate linkage
  modified_base 9: mod_base = OTHER; note = Nucleotide with phosphorothioate linkage
  modified_base 10: mod_base = OTHER; note = Nucleotide with phosphorothioate linkage
  modified_base 11: mod_base = OTHER; note = 2'-O-methyl modified abasic nucleotide with phosphorothioate linkage
  modified_base 12: mod_base = OTHER; note = Nucleotide with phosphorothioate linkage
  modified_base 13: mod_base = OTHER; note = 5-methylcytosine with phosphorothioate linkage
  modified_base 14: mod_base = OTHER; note = Nucleotide with phosphorothioate linkage
  modified_base 15: mod_base = OTHER; note = Nucleotide with phosphorothioate linkage
  modified_base 16: mod_base = OTHER; note = Locked nucleic acid with phosphorothioate linkage
  modified_base 17: mod_base = OTHER; note = 2'-O-methoxyethyl modified nucleotide with phosphorothioate linkage
  modified_base 18: mod_base = OTHER; note = 2'-O-methoxyethyl modified thymine with phosphorothioate linkage
  modified_base 19: mod_base = OTHER; note = 2'-O-methoxyethyl modified nucleotide with phosphorothioate linkage
  modified_base 20: mod_base = OTHER; note = Locked 5-methylcytosine
  misc_feature 1..5: note = RNA
  misc_feature 6..10: note = DNA
  misc_feature 11: note = RNA
  misc_feature 12..15: note = DNA
  misc_feature 16..20: note = RNA
gcagaggtgangcgaagtgc

SEQ ID NO: 1054 - DNA, 20 bp, synthetic construct
  source 1..20: mol_type = other DNA
  modified_base 1: mod_base = OTHER; note = 2'-O-methoxyethyl modified nucleotide with phosphorothioate linkage
  modified_base 2: mod_base = OTHER; note = 2'-O-methoxyethyl 5-methylcytosine with phosphorothioate linkage
  modified_base 3: mod_base = OTHER; note = 2'-O-methoxyethyl modified nucleotide with phosphorothioate linkage
  modified_base 4: mod_base = OTHER; note = 2'-O-methoxyethyl modified nucleotide with phosphorothioate linkage
  modified_base 5: mod_base = OTHER; note = 2'-O-methoxyethyl modified nucleotide with phosphorothioate linkage
  modified_base 6: mod_base = OTHER; note = Nucleotide with phosphorothioate linkage
  modified_base 7: mod_base = OTHER; note = Nucleotide with phosphorothioate linkage
  modified_base 8: mod_base = OTHER; note = Thymine with phosphorothioate linkage
  modified_base 9: mod_base = OTHER; note = Nucleotide with phosphorothioate linkage
  modified_base 10: mod_base = OTHER; note = Nucleotide with phosphorothioate linkage
  modified_base 11: mod_base = OTHER; note = 2'-O-methyl modified abasic nucleotide with phosphorothioate linkage
  modified_base 12: mod_base = OTHER; note = Nucleotide with phosphorothioate linkage
  modified_base 13: mod_base = OTHER; note = 5-methylcytosine with phosphorothioate linkage
  modified_base 14: mod_base = OTHER; note = Nucleotide with phosphorothioate linkage
  modified_base 15: mod_base = OTHER; note = Nucleotide with phosphorothioate linkage
  modified_base 16: mod_base = OTHER; note = 2'-O-methoxyethyl modified nucleotide with phosphorothioate linkage
  modified_base 17: mod_base = OTHER; note = Locked nucleic acid with phosphorothioate linkage
  modified_base 18: mod_base = OTHER; note = Locked thymine with phosphorothioate linkage
  modified_base 19: mod_base = OTHER; note = 2'-O-methoxyethyl modified nucleotide with phosphorothioate linkage
  modified_base 20: mod_base = OTHER; note = 2'-O-methoxyethyl 5-methylcytosine
  misc_feature 1..5: note = RNA
  misc_feature 6..10: note = DNA
  misc_feature 11: note = RNA
  misc_feature 12..15: note = DNA
  misc_feature 16..20: note = RNA
gcagaggtgangcgaagtgc

SEQ ID NO: 1055 - DNA, 20 bp, synthetic construct
  source 1..20: mol_type = other DNA
  modified_base 1: mod_base = OTHER; note = 2'-O-methoxyethyl modified nucleotide with phosphorothioate linkage
  modified_base 2: mod_base = OTHER; note = 2'-O-methoxyethyl 5-methylcytosine with phosphorothioate linkage
  modified_base 3: mod_base = OTHER; note = 2'-O-methoxyethyl modified nucleotide with phosphorothioate linkage
  modified_base 4: mod_base = OTHER; note = 2'-O-methoxyethyl modified nucleotide with phosphorothioate linkage
  modified_base 5: mod_base = OTHER; note = 2'-O-methoxyethyl modified nucleotide with phosphorothioate linkage
  modified_base 6: mod_base = OTHER; note = Nucleotide with phosphorothioate linkage
  modified_base 7: mod_base = OTHER; note = Nucleotide with phosphorothioate linkage
  modified_base 8: mod_base = OTHER; note = Thymine with phosphorothioate linkage
  modified_base 9: mod_base = OTHER; note = Nucleotide with phosphorothioate linkage
  modified_base 10: mod_base = OTHER; note = Nucleotide with phosphorothioate linkage
  modified_base 11: mod_base = OTHER; note = 2'-O-methyl modified abasic nucleotide with phosphorothioate linkage
  modified_base 12: mod_base = OTHER; note = Nucleotide with phosphorothioate linkage
  modified_base 13: mod_base = OTHER; note = 5-methylcytosine with phosphorothioate linkage
  modified_base 14: mod_base = OTHER; note = Nucleotide with phosphorothioate linkage
  modified_base 15: mod_base = OTHER; note = Nucleotide with phosphorothioate linkage
  modified_base 16: mod_base = OTHER; note = 2'-O-methoxyethyl modified nucleotide with phosphorothioate linkage
  modified_base 17: mod_base = OTHER; note = Locked nucleic acid with phosphorothioate linkage
  modified_base 18: mod_base = OTHER; note = 2'-O-methoxyethyl modified thymine with phosphorothioate linkage
  modified_base 19: mod_base = OTHER; note = Locked nucleic acid with phosphorothioate linkage
  modified_base 20: mod_base = OTHER; note = 2'-O-methoxyethyl 5-methylcytosine
  misc_feature 1..5: note = RNA
  misc_feature 6..10: note = DNA
  misc_feature 11: note = RNA
  misc_feature 12..15: note = DNA
  misc_feature 16..20: note = RNA
gcagaggtgangcgaagtgc

SEQ ID NO: 1056 - DNA, 20 bp, synthetic construct
  source 1..20: mol_type = other DNA
  modified_base 1: mod_base = OTHER; note = 2'-O-methoxyethyl modified nucleotide with phosphorothioate linkage
  modified_base 2: mod_base = OTHER; note = 2'-O-methoxyethyl 5-methylcytosine with phosphorothioate linkage
  modified_base 3: mod_base = OTHER; note = 2'-O-methoxyethyl modified nucleotide with phosphorothioate linkage
  modified_base 4: mod_base = OTHER; note = 2'-O-methoxyethyl modified nucleotide with phosphorothioate linkage
  modified_base 5: mod_base = OTHER; note = 2'-O-methoxyethyl modified nucleotide with phosphorothioate linkage
  modified_base 6: mod_base = OTHER; note = Nucleotide with phosphorothioate linkage
  modified_base 7: mod_base = OTHER; note = Nucleotide with phosphorothioate linkage
  modified_base 8: mod_base = OTHER; note = Thymine with phosphorothioate linkage
  modified_base 9: mod_base = OTHER; note = Nucleotide with phosphorothioate linkage
  modified_base 10: mod_base = OTHER; note = Nucleotide with phosphorothioate linkage
  modified_base 11: mod_base = OTHER; note = 2'-O-methyl modified abasic nucleotide with phosphorothioate linkage
  modified_base 12: mod_base = OTHER; note = Nucleotide with phosphorothioate linkage
  modified_base 13: mod_base = OTHER; note = 5-methylcytosine with phosphorothioate linkage
  modified_base 14: mod_base = OTHER; note = Nucleotide with phosphorothioate linkage
  modified_base 15: mod_base = OTHER; note = Nucleotide with phosphorothioate linkage
  modified_base 16: mod_base = OTHER; note = 2'-O-methoxyethyl modified nucleotide with phosphorothioate linkage
  modified_base 17: mod_base = OTHER; note = Locked nucleic acid with phosphorothioate linkage
  modified_base 18: mod_base = OTHER; note = 2'-O-methoxyethyl modified thymine with phosphorothioate linkage
  modified_base 19: mod_base = OTHER; note = 2'-O-methoxyethyl modified nucleotide with phosphorothioate linkage
  modified_base 20: mod_base = OTHER; note = Locked 5-methylcytosine
  misc_feature 1..5: note = RNA
  misc_feature 6..10: note = DNA
  misc_feature 11: note = RNA
  misc_feature 12..15: note = DNA
  misc_feature 16..20: note = RNA
gcagaggtgangcgaagtgc

SEQ ID NO: 1057 - DNA, 20 bp, synthetic construct
  source 1..20: mol_type = other DNA
  modified_base 1: mod_base = OTHER; note = 2'-O-methoxyethyl modified nucleotide with phosphorothioate linkage
  modified_base 2: mod_base = OTHER; note = 2'-O-methoxyethyl 5-methylcytosine with phosphorothioate linkage
  modified_base 3: mod_base = OTHER; note = 2'-O-methoxyethyl modified nucleotide with phosphorothioate linkage
  modified_base 4: mod_base = OTHER; note = 2'-O-methoxyethyl modified nucleotide with phosphorothioate linkage
  modified_base 5: mod_base = OTHER; note = 2'-O-methoxyethyl modified nucleotide with phosphorothioate linkage
  modified_base 6: mod_base = OTHER; note = Nucleotide with phosphorothioate linkage
  modified_base 7: mod_base = OTHER; note = Nucleotide with phosphorothioate linkage
  modified_base 8: mod_base = OTHER; note = Thymine with phosphorothioate linkage
  modified_base 9: mod_base = OTHER; note = Nucleotide with phosphorothioate linkage
  modified_base 10: mod_base = OTHER; note = Nucleotide with phosphorothioate linkage
  modified_base 11: mod_base = OTHER; note = 2'-O-methyl modified abasic nucleotide with phosphorothioate linkage
  modified_base 12: mod_base = OTHER; note = Nucleotide with phosphorothioate linkage
  modified_base 13: mod_base = OTHER; note = 5-methylcytosine with phosphorothioate linkage
  modified_base 14: mod_base = OTHER; note = Nucleotide with phosphorothioate linkage
  modified_base 15: mod_base = OTHER; note = Nucleotide with phosphorothioate linkage
  modified_base 16: mod_base = OTHER; note = 2'-O-methoxyethyl modified nucleotide with phosphorothioate linkage
  modified_base 17: mod_base = OTHER; note = 2'-O-methoxyethyl modified nucleotide with phosphorothioate linkage
  modified_base 18: mod_base = OTHER; note = Locked thymine with phosphorothioate linkage
  modified_base 19: mod_base = OTHER; note = Locked nucleic acid with phosphorothioate linkage
  modified_base 20: mod_base = OTHER; note = 2'-O-methoxyethyl 5-methylcytosine
  misc_feature 1..5: note = RNA
  misc_feature 6..10: note = DNA
  misc_feature 11: note = RNA
  misc_feature 12..15: note = DNA
  misc_feature 16..20: note = RNA
gcagaggtgangcgaagtgc

SEQ ID NO: 1058 - DNA, 20 bp, synthetic construct
  source 1..20: mol_type = other DNA
  modified_base 1: mod_base = OTHER; note = 2'-O-methoxyethyl modified nucleotide with phosphorothioate linkage
  modified_base 2: mod_base = OTHER; note = 2'-O-methoxyethyl 5-methylcytosine with phosphorothioate linkage
  modified_base 3: mod_base = OTHER; note = 2'-O-methoxyethyl modified nucleotide with phosphorothioate linkage
  modified_base 4: mod_base = OTHER; note = 2'-O-methoxyethyl modified nucleotide with phosphorothioate linkage
  modified_base 5: mod_base = OTHER; note = 2'-O-methoxyethyl modified nucleotide with phosphorothioate linkage
  modified_base 6: mod_base = OTHER; note = Nucleotide with phosphorothioate linkage
  modified_base 7: mod_base = OTHER; note = Nucleotide with phosphorothioate linkage
  modified_base 8: mod_base = OTHER; note = Thymine with phosphorothioate linkage
  modified_base 9: mod_base = OTHER; note = Nucleotide with phosphorothioate linkage
  modified_base 10: mod_base = OTHER; note = Nucleotide with phosphorothioate linkage
  modified_base 11: mod_base = OTHER; note = 2'-O-methyl modified abasic nucleotide with phosphorothioate linkage
  modified_base 12: mod_base = OTHER; note = Nucleotide with phosphorothioate linkage
  modified_base 13: mod_base = OTHER; note = 5-methylcytosine with phosphorothioate linkage
  modified_base 14: mod_base = OTHER; note = Nucleotide with phosphorothioate linkage
  modified_base 15: mod_base = OTHER; note = Nucleotide with phosphorothioate linkage
  modified_base 16: mod_base = OTHER; note = 2'-O-methoxyethyl modified nucleotide with phosphorothioate linkage
  modified_base 17: mod_base = OTHER; note = 2'-O-methoxyethyl modified nucleotide with phosphorothioate linkage
  modified_base 18: mod_base = OTHER; note = Locked thymine with phosphorothioate linkage
  modified_base 19: mod_base = OTHER; note = 2'-O-methoxyethyl modified nucleotide with phosphorothioate linkage
  modified_base 20: mod_base = OTHER; note = Locked 5-methylcytosine
  misc_feature 1..5: note = RNA
  misc_feature 6..10: note = DNA
  misc_feature 11: note = RNA
  misc_feature 12..15: note = DNA
  misc_feature 16..20: note = RNA
gcagaggtgangcgaagtgc

SEQ ID NO: 1059 - DNA, 20 bp, synthetic construct
  source 1..20: mol_type = other DNA
  modified_base 1: mod_base = OTHER; note = 2'-O-methoxyethyl modified nucleotide with phosphorothioate linkage
  modified_base 2: mod_base = OTHER; note = 2'-O-methoxyethyl 5-methylcytosine with phosphorothioate linkage
  modified_base 3: mod_base = OTHER; note = 2'-O-methoxyethyl modified nucleotide with phosphorothioate linkage
  modified_base 4: mod_base = OTHER; note = 2'-O-methoxyethyl modified nucleotide with phosphorothioate linkage
  modified_base 5: mod_base = OTHER; note = 2'-O-methoxyethyl modified nucleotide with phosphorothioate linkage
  modified_base 6: mod_base = OTHER; note = Nucleotide with phosphorothioate linkage
  modified_base 7: mod_base = OTHER; note = Nucleotide with phosphorothioate linkage
  modified_base 8: mod_base = OTHER; note = Thymine with phosphorothioate linkage
  modified_base 9: mod_base = OTHER; note = Nucleotide with phosphorothioate linkage
  modified_base 10: mod_base = OTHER; note = Nucleotide with phosphorothioate linkage
  modified_base 11: mod_base = OTHER; note = 2'-O-methyl modified abasic nucleotide with phosphorothioate linkage
  modified_base 12: mod_base = OTHER; note = Nucleotide with phosphorothioate linkage
  modified_base 13: mod_base = OTHER; note = 5-methylcytosine with phosphorothioate linkage
  modified_base 14: mod_base = OTHER; note = Nucleotide with phosphorothioate linkage
  modified_base 15: mod_base = OTHER; note = Nucleotide with phosphorothioate linkage
  modified_base 16: mod_base = OTHER; note = 2'-O-methoxyethyl modified nucleotide with phosphorothioate linkage
  modified_base 17: mod_base = OTHER; note = 2'-O-methoxyethyl modified nucleotide with phosphorothioate linkage
  modified_base 18: mod_base = OTHER; note = 2'-O-methoxyethyl modified thymine with phosphorothioate linkage
  modified_base 19: mod_base = OTHER; note = Locked nucleic acid with phosphorothioate linkage
  modified_base 20: mod_base = OTHER; note = Locked 5-methylcytosine
  misc_feature 1..5: note = RNA
  misc_feature 6..10: note = DNA
  misc_feature 11: note = RNA
  misc_feature 12..15: note = DNA
  misc_feature 16..20: note = RNA
gcagaggtgangcgaagtgc

SEQ ID NO: 1060 - DNA, 20 bp, synthetic construct
  source 1..20: mol_type = other DNA
  modified_base 1: mod_base = OTHER; note = Locked nucleic acid with phosphorothioate linkage
  modified_base 2: mod_base = OTHER; note = 2'-O-methoxyethyl 5-methylcytosine with phosphorothioate linkage
  modified_base 3: mod_base = OTHER; note = 2'-O-methoxyethyl modified nucleotide with phosphorothioate linkage
  modified_base 4: mod_base = OTHER; note = 2'-O-methoxyethyl modified nucleotide with phosphorothioate linkage
  modified_base 5: mod_base = OTHER; note = 2'-O-methoxyethyl modified nucleotide with phosphorothioate linkage
  modified_base 6: mod_base = OTHER; note = Nucleotide with phosphorothioate linkage
  modified_base 7: mod_base = OTHER; note = Nucleotide with phosphorothioate linkage
  modified_base 8: mod_base = OTHER; note = Thymine with phosphorothioate linkage
  modified_base 9: mod_base = OTHER; note = Nucleotide with phosphorothioate linkage
  modified_base 10: mod_base = OTHER; note = Nucleotide with phosphorothioate linkage
  modified_base 11: mod_base = OTHER; note = 2'-O-methyl modified abasic nucleotide with phosphorothioate linkage
  modified_base 12: mod_base = OTHER; note = Nucleotide with phosphorothioate linkage
  modified_base 13: mod_base = OTHER; note = 5-methylcytosine with phosphorothioate linkage
  modified_base 14: mod_base = OTHER; note = Nucleotide with phosphorothioate linkage
  modified_base 15: mod_base = OTHER; note = Nucleotide with phosphorothioate linkage
  modified_base 16: mod_base = OTHER; note = 2'-O-methoxyethyl modified nucleotide with phosphorothioate linkage
  modified_base 17: mod_base = OTHER; note = 2'-O-methoxyethyl modified nucleotide with phosphorothioate linkage
  modified_base 18: mod_base = OTHER; note = 2'-O-methoxyethyl modified thymine with phosphorothioate linkage
  modified_base 19: mod_base = OTHER; note = 2'-O-methoxyethyl modified nucleotide with phosphorothioate linkage
  modified_base 20: mod_base = OTHER; note = 2'-O-methoxyethyl 5-methylcytosine
  misc_feature 1..5: note = RNA
  misc_feature 6..10: note = DNA
  misc_feature 11: note = RNA
  misc_feature 12..15: note = DNA
  misc_feature 16..20: note = RNA
gcagaggtgangcgaagtgc

SEQ ID NO: 1061 - DNA, 20 bp, synthetic construct
  source 1..20: mol_type = other DNA
  modified_base 1: mod_base = OTHER; note = 2'-O-methoxyethyl modified nucleotide with phosphorothioate linkage
  modified_base 2: mod_base = OTHER; note = Locked 5-methylcytosine with phosphorothioate linkage
  modified_base 3: mod_base = OTHER; note = 2'-O-methoxyethyl modified nucleotide with phosphorothioate linkage
  modified_base 4: mod_base = OTHER; note = 2'-O-methoxyethyl modified nucleotide with phosphorothioate linkage
  modified_base 5: mod_base = OTHER; note = 2'-O-methoxyethyl modified nucleotide with phosphorothioate linkage
  modified_base 6: mod_base = OTHER; note = Nucleotide with phosphorothioate linkage
  modified_base 7: mod_base = OTHER; note = Nucleotide with phosphorothioate linkage
  modified_base 8: mod_base = OTHER; note = Thymine with phosphorothioate linkage
  modified_base 9: mod_base = OTHER; note = Nucleotide with phosphorothioate linkage
  modified_base 10: mod_base = OTHER; note = Nucleotide with phosphorothioate linkage
  modified_base 11: mod_base = OTHER; note = 2'-O-methyl modified abasic nucleotide with phosphorothioate linkage
  modified_base 12: mod_base = OTHER; note = Nucleotide with phosphorothioate linkage
  modified_base 13: mod_base = OTHER; note = 5-methylcytosine with phosphorothioate linkage
  modified_base 14: mod_base = OTHER; note = Nucleotide with phosphorothioate linkage
  modified_base 15: mod_base = OTHER; note = Nucleotide with phosphorothioate linkage
  modified_base 16: mod_base = OTHER; note = 2'-O-methoxyethyl modified nucleotide with phosphorothioate linkage
  modified_base 17: mod_base = OTHER; note = 2'-O-methoxyethyl modified nucleotide with phosphorothioate linkage
  modified_base 18: mod_base = OTHER; note = 2'-O-methoxyethyl modified thymine with phosphorothioate linkage
  modified_base 19: mod_base = OTHER; note = 2'-O-methoxyethyl modified nucleotide with phosphorothioate linkage
  modified_base 20: mod_base = OTHER; note = 2'-O-methoxyethyl 5-methylcytosine
  misc_feature 1..5: note = RNA
  misc_feature 6..10: note = DNA
  misc_feature 11: note = RNA
  misc_feature 12..15: note = DNA
  misc_feature 16..20: note = RNA
gcagaggtgangcgaagtgc

SEQ ID NO: 1062 - DNA, 20 bp, synthetic construct
  source 1..20: mol_type = other DNA
  modified_base 1: mod_base = OTHER; note = 2'-O-methoxyethyl modified nucleotide with phosphorothioate linkage
  modified_base 2: mod_base = OTHER; note = 2'-O-methoxyethyl 5-methylcytosine with phosphorothioate linkage
  modified_base 3: mod_base = OTHER; note = Locked nucleic acid with phosphorothioate linkage
  modified_base 4: mod_base = OTHER; note = 2'-O-methoxyethyl modified nucleotide with phosphorothioate linkage
  modified_base 5: mod_base = OTHER; note = 2'-O-methoxyethyl modified nucleotide with phosphorothioate linkage
  modified_base 6: mod_base = OTHER; note = Nucleotide with phosphorothioate linkage
  modified_base 7: mod_base = OTHER; note = Nucleotide with phosphorothioate linkage
  modified_base 8: mod_base = OTHER; note = Thymine with phosphorothioate linkage
  modified_base 9: mod_base = OTHER; note = Nucleotide with phosphorothioate linkage
  modified_base 10: mod_base = OTHER; note = Nucleotide with phosphorothioate linkage
  modified_base 11: mod_base = OTHER; note = 2'-O-methyl modified abasic nucleotide with phosphorothioate linkage
  modified_base 12: mod_base = OTHER; note = Nucleotide with phosphorothioate linkage
  modified_base 13: mod_base = OTHER; note = 5-methylcytosine with phosphorothioate linkage
  modified_base 14: mod_base = OTHER; note = Nucleotide with phosphorothioate linkage
  modified_base 15: mod_base = OTHER; note = Nucleotide with phosphorothioate linkage
  modified_base 16: mod_base = OTHER; note = 2'-O-methoxyethyl modified nucleotide with phosphorothioate linkage
  modified_base 17: mod_base = OTHER; note = 2'-O-methoxyethyl modified nucleotide with phosphorothioate linkage
  modified_base 18: mod_base = OTHER; note = 2'-O-methoxyethyl modified thymine with phosphorothioate linkage
  modified_base 19: mod_base = OTHER; note = 2'-O-methoxyethyl modified nucleotide with phosphorothioate linkage
  modified_base 20: mod_base = OTHER; note = 2'-O-methoxyethyl 5-methylcytosine
  misc_feature 1..5: note = RNA
  misc_feature 6..10: note = DNA
  misc_feature 11: note = RNA
  misc_feature 12..15: note = DNA
  misc_feature 16..20: note = RNA
gcagaggtgangcgaagtgc

SEQ ID NO: 1063 - DNA, 20 bp, synthetic construct
  source 1..20: mol_type = other DNA
  modified_base 1: mod_base = OTHER; note = 2'-O-methoxyethyl modified nucleotide with phosphorothioate linkage
  modified_base 2: mod_base = OTHER; note = 2'-O-methoxyethyl 5-methylcytosine with phosphorothioate linkage
  modified_base 3: mod_base = OTHER; note = 2'-O-methoxyethyl modified nucleotide with phosphorothioate linkage
  modified_base 4: mod_base = OTHER; note = Locked nucleic acid with phosphorothioate linkage
  modified_base 5: mod_base = OTHER; note = 2'-O-methoxyethyl modified nucleotide with phosphorothioate linkage
  modified_base 6: mod_base = OTHER; note = Nucleotide with phosphorothioate linkage
  modified_base 7: mod_base = OTHER; note = Nucleotide with phosphorothioate linkage
  modified_base 8: mod_base = OTHER; note = Thymine with phosphorothioate linkage
  modified_base 9: mod_base = OTHER; note = Nucleotide with phosphorothioate linkage
  modified_base 10: mod_base = OTHER; note = Nucleotide with phosphorothioate linkage
  modified_base 11: mod_base = OTHER; note = 2'-O-methyl modified abasic nucleotide with phosphorothioate linkage
  modified_base 12: mod_base = OTHER; note = Nucleotide with phosphorothioate linkage
  modified_base 13: mod_base = OTHER; note = 5-methylcytosine with phosphorothioate linkage
  modified_base 14: mod_base = OTHER; note = Nucleotide with phosphorothioate linkage
  modified_base 15: mod_base = OTHER; note = Nucleotide with phosphorothioate linkage
  modified_base 16: mod_base = OTHER; note = 2'-O-methoxyethyl modified nucleotide with phosphorothioate linkage
  modified_base 17: mod_base = OTHER; note = 2'-O-methoxyethyl modified nucleotide with phosphorothioate linkage
  modified_base 18: mod_base = OTHER; note = 2'-O-methoxyethyl modified thymine with phosphorothioate linkage
  modified_base 19: mod_base = OTHER; note = 2'-O-methoxyethyl modified nucleotide with phosphorothioate linkage
  modified_base 20: mod_base = OTHER; note = 2'-O-methoxyethyl 5-methylcytosine
  misc_feature 1..5: note = RNA
  misc_feature 6..10: note = DNA
  misc_feature 11: note = RNA
  misc_feature 12..15: note = DNA
  misc_feature 16..20: note = RNA
gcagaggtgangcgaagtgc

SEQ ID NO: 1064 - DNA, 20 bp, synthetic construct
  source 1..20: mol_type = other DNA
  modified_base 1: mod_base = OTHER; note = 2'-O-methoxyethyl modified nucleotide with phosphorothioate linkage
  modified_base 2: mod_base = OTHER; note = 2'-O-methoxyethyl 5-methylcytosine with phosphorothioate linkage
  modified_base 3: mod_base = OTHER; note = 2'-O-methoxyethyl modified nucleotide with phosphorothioate linkage
  modified_base 4: mod_base = OTHER; note = 2'-O-methoxyethyl modified nucleotide with phosphorothioate linkage
  modified_base 5: mod_base = OTHER; note = 2'-O-methoxyethyl modified nucleotide with phosphorothioate linkage
  modified_base 6: mod_base = OTHER; note = Nucleotide with phosphorothioate linkage
  modified_base 7: mod_base = OTHER; note = Nucleotide with phosphorothioate linkage
  modified_base 8: mod_base = OTHER; note = Thymine with phosphorothioate linkage
  modified_base 9: mod_base = OTHER; note = Nucleotide with phosphorothioate linkage
  modified_base 10: mod_base = OTHER; note = Nucleotide with phosphorothioate linkage
  modified_base 11: mod_base = OTHER; note = 2'-O-methyl modified abasic nucleotide with phosphorothioate linkage
  modified_base 12: mod_base = OTHER; note = Nucleotide with phosphorothioate linkage
  modified_base 13: mod_base = OTHER; note = 5-methylcytosine with phosphorothioate linkage
  modified_base 14: mod_base = OTHER; note = Nucleotide with phosphorothioate linkage
  modified_base 15: mod_base = OTHER; note = Nucleotide with phosphorothioate linkage
  modified_base 16: mod_base = OTHER; note = Locked nucleic acid with phosphorothioate linkage
  modified_base 17: mod_base = OTHER; note = 2'-O-methoxyethyl modified nucleotide with phosphorothioate linkage
  modified_base 18: mod_base = OTHER; note = 2'-O-methoxyethyl modified thymine with phosphorothioate linkage
  modified_base 19: mod_base = OTHER; note = 2'-O-methoxyethyl modified nucleotide with phosphorothioate linkage
  modified_base 20: mod_base = OTHER; note = 2'-O-methoxyethyl 5-methylcytosine
  misc_feature 1..5: note = RNA
  misc_feature 6..10: note = DNA
  misc_feature 11: note = RNA
  misc_feature 12..15: note = DNA
  misc_feature 16..20: note = RNA
gcagaggtgangcgaagtgc

SEQ ID NO: 1065 - DNA, 20 bp, synthetic construct
  source 1..20: mol_type = other DNA
  modified_base 1: mod_base = OTHER; note = 2'-O-methoxyethyl modified nucleotide with phosphorothioate linkage
  modified_base 2: mod_base = OTHER; note = 2'-O-methoxyethyl 5-methylcytosine with phosphorothioate linkage
  modified_base 3: mod_base = OTHER; note = 2'-O-methoxyethyl modified nucleotide with phosphorothioate linkage
  modified_base 4: mod_base = OTHER; note = 2'-O-methoxyethyl modified nucleotide with phosphorothioate linkage
  modified_base 5: mod_base = OTHER; note = 2'-O-methoxyethyl modified nucleotide with phosphorothioate linkage
  modified_base 6: mod_base = OTHER; note = Nucleotide with phosphorothioate linkage
  modified_base 7: mod_base = OTHER; note = Nucleotide with phosphorothioate linkage
  modified_base 8: mod_base = OTHER; note = Thymine with phosphorothioate linkage
  modified_base 9: mod_base = OTHER; note = Nucleotide with phosphorothioate linkage
  modified_base 10: mod_base = OTHER; note = Nucleotide with phosphorothioate linkage
  modified_base 11: mod_base = OTHER; note = 2'-O-methyl modified abasic nucleotide with phosphorothioate linkage
  modified_base 12: mod_base = OTHER; note = Nucleotide with phosphorothioate linkage
  modified_base 13: mod_base = OTHER; note = 5-methylcytosine with phosphorothioate linkage
  modified_base 14: mod_base = OTHER; note = Nucleotide with phosphorothioate linkage
  modified_base 15: mod_base = OTHER; note = Nucleotide with phosphorothioate linkage
  modified_base 16: mod_base = OTHER; note = 2'-O-methoxyethyl modified nucleotide with phosphorothioate linkage
  modified_base 17: mod_base = OTHER; note = 2'-O-methoxyethyl modified nucleotide with phosphorothioate linkage
  modified_base 18: mod_base = OTHER; note = Locked thymine with phosphorothioate linkage
  modified_base 19: mod_base = OTHER; note = 2'-O-methoxyethyl modified nucleotide with phosphorothioate linkage
  modified_base 20: mod_base = OTHER; note = 2'-O-methoxyethyl 5-methylcytosine
  misc_feature 1..5: note = RNA
  misc_feature 6..10: note = DNA
  misc_feature 11: note = RNA
  misc_feature 12..15: note = DNA
  misc_feature 16..20: note = RNA
gcagaggtgangcgaagtgc

SEQ ID NO: 1066 - DNA, 20 bp, synthetic construct
  source 1..20: mol_type = other DNA
  modified_base 1: mod_base = OTHER; note = 2'-O-methoxyethyl modified nucleotide with phosphorothioate linkage
  modified_base 2: mod_base = OTHER; note = 2'-O-methoxyethyl 5-methylcytosine with phosphorothioate linkage
  modified_base 3: mod_base = OTHER; note = 2'-O-methoxyethyl modified nucleotide with phosphorothioate linkage
  modified_base 4: mod_base = OTHER; note = 2'-O-methoxyethyl modified nucleotide with phosphorothioate linkage
  modified_base 5: mod_base = OTHER; note = 2'-O-methoxyethyl modified nucleotide with phosphorothioate linkage
  modified_base 6: mod_base = OTHER; note = Nucleotide with phosphorothioate linkage
  modified_base 7: mod_base = OTHER; note = Nucleotide with phosphorothioate linkage
  modified_base 8: mod_base = OTHER; note = Thymine with phosphorothioate linkage
  modified_base 9: mod_base = OTHER; note = Nucleotide with phosphorothioate linkage
  modified_base 10: mod_base = OTHER; note = Nucleotide with phosphorothioate linkage
  modified_base 11: mod_base = OTHER; note = 2'-O-methyl modified abasic nucleotide with phosphorothioate linkage
  modified_base 12: mod_base = OTHER; note = Nucleotide with phosphorothioate linkage
  modified_base 13: mod_base = OTHER; note = 5-methylcytosine with phosphorothioate linkage
  modified_base 14: mod_base = OTHER; note = Nucleotide with phosphorothioate linkage
  modified_base 15: mod_base = OTHER; note = Nucleotide with phosphorothioate linkage
  modified_base 16: mod_base = OTHER; note = 2'-O-methoxyethyl modified nucleotide with phosphorothioate linkage
  modified_base 17: mod_base = OTHER; note = 2'-O-methoxyethyl modified nucleotide with phosphorothioate linkage
  modified_base 18: mod_base = OTHER; note = 2'-O-methoxyethyl modified thymine with phosphorothioate linkage
  modified_base 19: mod_base = OTHER; note = Locked nucleic acid with phosphorothioate linkage
  modified_base 20: mod_base = OTHER; note = 2'-O-methoxyethyl 5-methylcytosine
  misc_feature 1..5: note = RNA
  misc_feature 6..10: note = DNA
  misc_feature 11: note = RNA
  misc_feature 12..15: note = DNA
  misc_feature 16..20: note = RNA
gcagaggtgangcgaagtgc

SEQ ID NO: 1067 - DNA, 20 bp, synthetic construct
  source 1..20: mol_type = other DNA
  modified_base 1: mod_base = OTHER; note = 2'-O-methoxyethyl modified nucleotide with phosphorothioate linkage
  modified_base 2: mod_base = OTHER; note = 2'-O-methoxyethyl 5-methylcytosine with phosphorothioate linkage
  modified_base 3: mod_base = OTHER; note = 2'-O-methoxyethyl modified nucleotide with phosphorothioate linkage
  modified_base 4: mod_base = OTHER; note = 2'-O-methoxyethyl modified nucleotide with phosphorothioate linkage
  modified_base 5: mod_base = OTHER; note = 2'-O-methoxyethyl modified nucleotide with phosphorothioate linkage
  modified_base 6: mod_base = OTHER; note = Nucleotide with phosphorothioate linkage
  modified_base 7: mod_base = OTHER; note = Nucleotide with phosphorothioate linkage
  modified_base 8: mod_base = OTHER; note = Thymine with phosphorothioate linkage
  modified_base 9: mod_base = OTHER; note = Nucleotide with phosphorothioate linkage
  modified_base 10: mod_base = OTHER; note = Nucleotide with phosphorothioate linkage
  modified_base 11: mod_base = OTHER; note = 2'-O-methyl modified abasic nucleotide with phosphorothioate linkage
  modified_base 12: mod_base = OTHER; note = Nucleotide with phosphorothioate linkage
  modified_base 13: mod_base = OTHER; note = 5-methylcytosine with phosphorothioate linkage
  modified_base 14: mod_base = OTHER; note = Nucleotide with phosphorothioate linkage
  modified_base 15: mod_base = OTHER; note = Nucleotide with phosphorothioate linkage
  modified_base 16: mod_base = OTHER; note = 2'-O-methoxyethyl modified nucleotide with phosphorothioate linkage
  modified_base 17: mod_base = OTHER; note = 2'-O-methoxyethyl modified nucleotide with phosphorothioate linkage
  modified_base 18: mod_base = OTHER; note = 2'-O-methoxyethyl modified thymine with phosphorothioate linkage
  modified_base 19: mod_base = OTHER; note = 2'-O-methoxyethyl modified nucleotide with phosphorothioate linkage
  modified_base 20: mod_base = OTHER; note = Locked 5-methylcytosine
  misc_feature 1..5: note = RNA
  misc_feature 6..10: note = DNA
  misc_feature 11: note = RNA
  misc_feature 12..15: note = DNA
  misc_feature 16..20: note = RNA
gcagaggtgangcgaagtgc

SEQ ID NO: 1068 - DNA, 20 bp, synthetic construct
  source 1..20: mol_type = other DNA
  modified_base 1: mod_base = OTHER; note = Locked nucleic acid with phosphorothioate linkage
  modified_base 2: mod_base = OTHER; note = 2'-O-methoxyethyl 5-methylcytosine with phosphorothioate linkage
  modified_base 3: mod_base = OTHER; note = 2'-O-methoxyethyl modified nucleotide with phosphorothioate linkage
  modified_base 4: mod_base = OTHER; note = 2'-O-methoxyethyl modified nucleotide with phosphorothioate linkage
  modified_base 5: mod_base = OTHER; note = 2'-O-methoxyethyl modified nucleotide with phosphorothioate linkage
  modified_base 6: mod_base = OTHER; note = Nucleotide with phosphorothioate linkage
  modified_base 7: mod_base = OTHER; note = Nucleotide with phosphorothioate linkage
  modified_base 8: mod_base = OTHER; note = Thymine with phosphorothioate linkage
  modified_base 9: mod_base = OTHER; note = Nucleotide with phosphorothioate linkage
  modified_base 10: mod_base = OTHER; note = Thymine with phosphorothioate linkage
  modified_base 11: mod_base = OTHER; note = Nucleotide with phosphorothioate linkage
  modified_base 12: mod_base = OTHER; note = Nucleotide with phosphorothioate linkage
  modified_base 13: mod_base = OTHER; note = 5-methylcytosine with phosphorothioate linkage
  modified_base 14: mod_base = OTHER; note = Nucleotide with phosphorothioate linkage
  modified_base 15: mod_base = OTHER; note = Nucleotide with phosphorothioate linkage
  modified_base 16: mod_base = OTHER; note = 2'-O-methoxyethyl modified nucleotide with phosphorothioate linkage
  modified_base 17: mod_base = OTHER; note = 2'-O-methoxyethyl modified nucleotide with phosphorothioate linkage
  modified_base 18: mod_base = OTHER; note = 2'-O-methoxyethyl modified thymine with phosphorothioate linkage
  modified_base 19: mod_base = OTHER; note = 2'-O-methoxyethyl modified nucleotide with phosphorothioate linkage
  modified_base 20: mod_base = OTHER; note = 2'-O-methoxyethyl 5-methylcytosine
  misc_feature 1..5: note = RNA
  misc_feature 6..15: note = DNA
  misc_feature 16..20: note = RNA
gcagaggtgtagcgaagtgc

SEQ ID NO: 1069 - DNA, 20 bp, synthetic construct
  source 1..20: mol_type = other DNA
  modified_base 1: mod_base = OTHER; note = 2'-O-methoxyethyl modified nucleotide with phosphorothioate linkage
  modified_base 2: mod_base = OTHER; note = Locked 5-methylcytosine with phosphorothioate linkage
  modified_base 3: mod_base = OTHER; note = 2'-O-methoxyethyl modified nucleotide with phosphorothioate linkage
  modified_base 4: mod_base = OTHER; note = 2'-O-methoxyethyl modified nucleotide with phosphorothioate linkage
  modified_base 5: mod_base = OTHER; note = 2'-O-methoxyethyl modified nucleotide with phosphorothioate linkage
  modified_base 6: mod_base = OTHER; note = Nucleotide with phosphorothioate linkage
  modified_base 7: mod_base = OTHER; note = Nucleotide with phosphorothioate linkage
  modified_base 8: mod_base = OTHER; note = Thymine with phosphorothioate linkage
  modified_base 9: mod_base = OTHER; note = Nucleotide with phosphorothioate linkage
  modified_base 10: mod_base = OTHER; note = Thymine with phosphorothioate linkage
  modified_base 11: mod_base = OTHER; note = Nucleotide with phosphorothioate linkage
  modified_base 12: mod_base = OTHER; note = Nucleotide with phosphorothioate linkage
  modified_base 13: mod_base = OTHER; note = 5-methylcytosine with phosphorothioate linkage
  modified_base 14: mod_base = OTHER; note = Nucleotide with phosphorothioate linkage
  modified_base 15: mod_base = OTHER; note = Nucleotide with phosphorothioate linkage
  modified_base 16: mod_base = OTHER; note = 2'-O-methoxyethyl modified nucleotide with phosphorothioate linkage
  modified_base 17: mod_base = OTHER; note = 2'-O-methoxyethyl modified nucleotide with phosphorothioate linkage
  modified_base 18: mod_base = OTHER; note = 2'-O-methoxyethyl modified thymine with phosphorothioate linkage
  modified_base 19: mod_base = OTHER; note = 2'-O-methoxyethyl modified nucleotide with phosphorothioate linkage
  modified_base 20: mod_base = OTHER; note = 2'-O-methoxyethyl 5-methylcytosine
  misc_feature 1..5: note = RNA
  misc_feature 6..15: note = DNA
  misc_feature 16..20: note = RNA
gcagaggtgtagcgaagtgc

SEQ ID NO: 1070 - DNA, 20 bp, synthetic construct
  source 1..20: mol_type = other DNA
  modified_base 1: mod_base = OTHER; note = 2'-O-methoxyethyl modified nucleotide with phosphorothioate linkage
  modified_base 2: mod_base = OTHER; note = 2'-O-methoxyethyl 5-methylcytosine with phosphorothioate linkage
  modified_base 3: mod_base = OTHER; note = Locked nucleic acid with phosphorothioate linkage
  modified_base 4: mod_base = OTHER; note = 2'-O-methoxyethyl modified nucleotide with phosphorothioate linkage
  modified_base 5: mod_base = OTHER; note = 2'-O-methoxyethyl modified nucleotide with phosphorothioate linkage
  modified_base 6: mod_base = OTHER; note = Nucleotide with phosphorothioate linkage
  modified_base 7: mod_base = OTHER; note = Nucleotide with phosphorothioate linkage
  modified_base 8: mod_base = OTHER; note = Thymine with phosphorothioate linkage
  modified_base 9: mod_base = OTHER; note = Nucleotide with phosphorothioate linkage
  modified_base 10: mod_base = OTHER; note = Thymine with phosphorothioate linkage
  modified_base 11: mod_base = OTHER; note = Nucleotide with phosphorothioate linkage
  modified_base 12: mod_base = OTHER; note = Nucleotide with phosphorothioate linkage
  modified_base 13: mod_base = OTHER; note = 5-methylcytosine with phosphorothioate linkage
  modified_base 14: mod_base = OTHER; note = Nucleotide with phosphorothioate linkage
  modified_base 15: mod_base = OTHER; note = Nucleotide with phosphorothioate linkage
  modified_base 16: mod_base = OTHER; note = 2'-O-methoxyethyl modified nucleotide with phosphorothioate linkage
  modified_base 17: mod_base = OTHER; note = 2'-O-methoxyethyl modified nucleotide with phosphorothioate linkage
  modified_base 18: mod_base = OTHER; note = 2'-O-methoxyethyl modified thymine with phosphorothioate linkage
  modified_base 19: mod_base = OTHER; note = 2'-O-methoxyethyl modified nucleotide with phosphorothioate linkage
  modified_base 20: mod_base = OTHER; note = 2'-O-methoxyethyl 5-methylcytosine
  misc_feature 1..5: note = RNA
  misc_feature 6..15: note = DNA
  misc_feature 16..20: note = RNA
gcagaggtgtagcgaagtgc

SEQ ID NO: 1071 - DNA, 20 bp, synthetic construct
  source 1..20: mol_type = other DNA
  modified_base 1: mod_base = OTHER; note = 2'-O-methoxyethyl modified nucleotide with phosphorothioate linkage
  modified_base 2: mod_base = OTHER; note = 2'-O-methoxyethyl 5-methylcytosine with phosphorothioate linkage
  modified_base 3: mod_base = OTHER; note = 2'-O-methoxyethyl modified nucleotide with phosphorothioate linkage
  modified_base 4: mod_base = OTHER; note = Locked nucleic acid with phosphorothioate linkage
  modified_base 5: mod_base = OTHER; note = 2'-O-methoxyethyl modified nucleotide with phosphorothioate linkage
  modified_base 6: mod_base = OTHER; note = Nucleotide with phosphorothioate linkage
  modified_base 7: mod_base = OTHER; note = Nucleotide with phosphorothioate linkage
  modified_base 8: mod_base = OTHER; note = Thymine with phosphorothioate linkage
  modified_base 9: mod_base = OTHER; note = Nucleotide with phosphorothioate linkage
  modified_base 10: mod_base = OTHER; note = Thymine with phosphorothioate linkage
  modified_base 11: mod_base = OTHER; note = Nucleotide with phosphorothioate linkage
  modified_base 12: mod_base = OTHER; note = Nucleotide with phosphorothioate linkage
  modified_base 13: mod_base = OTHER; note = 5-methylcytosine with phosphorothioate linkage
  modified_base 14: mod_base = OTHER; note = Nucleotide with phosphorothioate linkage
  modified_base 15: mod_base = OTHER; note = Nucleotide with phosphorothioate linkage
  modified_base 16: mod_base = OTHER; note = 2'-O-methoxyethyl modified nucleotide with phosphorothioate linkage
  modified_base 17: mod_base = OTHER; note = 2'-O-methoxyethyl modified nucleotide with phosphorothioate linkage
  modified_base 18: mod_base = OTHER; note = 2'-O-methoxyethyl modified thymine with phosphorothioate linkage
  modified_base 19: mod_base = OTHER; note = 2'-O-methoxyethyl modified nucleotide with phosphorothioate linkage
  modified_base 20: mod_base = OTHER; note = 2'-O-methoxyethyl 5-methylcytosine
  misc_feature 1..5: note = RNA
  misc_feature 6..15: note = DNA
  misc_feature 16..20: note = RNA
gcagaggtgtagcgaagtgc

SEQ ID NO: 1072 - DNA, 20 bp, synthetic construct
  source 1..20: mol_type = other DNA
  modified_base 1: mod_base = OTHER; note = 2'-O-methoxyethyl modified nucleotide with phosphorothioate linkage
  modified_base 2: mod_base = OTHER; note = 2'-O-methoxyethyl 5-methylcytosine with phosphorothioate linkage
  modified_base 3: mod_base = OTHER; note = 2'-O-methoxyethyl modified nucleotide with phosphorothioate linkage
  modified_base 4: mod_base = OTHER; note = 2'-O-methoxyethyl modified nucleotide with phosphorothioate linkage
  modified_base 5: mod_base = OTHER; note = Locked nucleic acid with phosphorothioate linkage
  modified_base 6: mod_base = OTHER; note = Nucleotide with phosphorothioate linkage
  modified_base 7: mod_base = OTHER; note = Nucleotide with phosphorothioate linkage
  modified_base 8: mod_base = OTHER; note = Thymine with phosphorothioate linkage
  modified_base 9: mod_base = OTHER; note = Nucleotide with phosphorothioate linkage
  modified_base 10: mod_base = OTHER; note = Thymine with phosphorothioate linkage
  modified_base 11: mod_base = OTHER; note = Nucleotide with phosphorothioate linkage
  modified_base 12: mod_base = OTHER; note = Nucleotide with phosphorothioate linkage
  modified_base 13: mod_base = OTHER; note = 5-methylcytosine with phosphorothioate linkage
  modified_base 14: mod_base = OTHER; note = Nucleotide with phosphorothioate linkage
  modified_base 15: mod_base = OTHER; note = Nucleotide with phosphorothioate linkage
  modified_base 16: mod_base = OTHER; note = 2'-O-methoxyethyl modified nucleotide with phosphorothioate linkage
  modified_base 17: mod_base = OTHER; note = 2'-O-methoxyethyl modified nucleotide with phosphorothioate linkage
  modified_base 18: mod_base = OTHER; note = 2'-O-methoxyethyl modified thymine with phosphorothioate linkage
  modified_base 19: mod_base = OTHER; note = 2'-O-methoxyethyl modified nucleotide with phosphorothioate linkage
  modified_base 20: mod_base = OTHER; note = 2'-O-methoxyethyl 5-methylcytosine
  misc_feature 1..5: note = RNA
  misc_feature 6..15: note = DNA
  misc_feature 16..20: note = RNA
gcagaggtgtagcgaagtgc

SEQ ID NO: 1073 - DNA, 20 bp, synthetic construct
  source 1..20: mol_type = other DNA
  modified_base 1: mod_base = OTHER; note = 2'-O-methoxyethyl modified nucleotide with phosphorothioate linkage
  modified_base 2: mod_base = OTHER; note = 2'-O-methoxyethyl 5-methylcytosine with phosphorothioate linkage
  modified_base 3: mod_base = OTHER; note = 2'-O-methoxyethyl modified nucleotide with phosphorothioate linkage
  modified_base 4: mod_base = OTHER; note = 2'-O-methoxyethyl modified nucleotide with phosphorothioate linkage
  modified_base 5: mod_base = OTHER; note = 2'-O-methoxyethyl modified nucleotide with phosphorothioate linkage
  modified_base 6: mod_base = OTHER; note = Nucleotide with phosphorothioate linkage
  modified_base 7: mod_base = OTHER; note = Nucleotide with phosphorothioate linkage
  modified_base 8: mod_base = OTHER; note = Thymine with phosphorothioate linkage
  modified_base 9: mod_base = OTHER; note = Nucleotide with phosphorothioate linkage
  modified_base 10: mod_base = OTHER; note = Thymine with phosphorothioate linkage
  modified_base 11: mod_base = OTHER; note = Nucleotide with phosphorothioate linkage
  modified_base 12: mod_base = OTHER; note = Nucleotide with phosphorothioate linkage
  modified_base 13: mod_base = OTHER; note = 5-methylcytosine with phosphorothioate linkage
  modified_base 14: mod_base = OTHER; note = Nucleotide with phosphorothioate linkage
  modified_base 15: mod_base = OTHER; note = Nucleotide with phosphorothioate linkage
  modified_base 16: mod_base = OTHER; note = Locked nucleic acid with phosphorothioate linkage
  modified_base 17: mod_base = OTHER; note = 2'-O-methoxyethyl modified nucleotide with phosphorothioate linkage
  modified_base 18: mod_base = OTHER; note = 2'-O-methoxyethyl modified thymine with phosphorothioate linkage
  modified_base 19: mod_base = OTHER; note = 2'-O-methoxyethyl modified nucleotide with phosphorothioate linkage
  modified_base 20: mod_base = OTHER; note = 2'-O-methoxyethyl 5-methylcytosine
  misc_feature 1..5: note = RNA
  misc_feature 6..15: note = DNA
  misc_feature 16..20: note = RNA
gcagaggtgtagcgaagtgc

SEQ ID NO: 1074 - DNA, 20 bp, synthetic construct
  source 1..20: mol_type = other DNA
  modified_base 1: mod_base = OTHER; note = 2'-O-methoxyethyl modified nucleotide with phosphorothioate linkage
  modified_base 2: mod_base = OTHER; note = 2'-O-methoxyethyl 5-methylcytosine with phosphorothioate linkage
  modified_base 3: mod_base = OTHER; note = 2'-O-methoxyethyl modified nucleotide with phosphorothioate linkage
  modified_base 4: mod_base = OTHER; note = 2'-O-methoxyethyl modified nucleotide with phosphorothioate linkage
  modified_base 5: mod_base = OTHER; note = 2'-O-methoxyethyl modified nucleotide with phosphorothioate linkage
  modified_base 6: mod_base = OTHER; note = Nucleotide with phosphorothioate linkage
  modified_base 7: mod_base = OTHER; note = Nucleotide with phosphorothioate linkage
  modified_base 8: mod_base = OTHER; note = Thymine with phosphorothioate linkage
  modified_base 9: mod_base = OTHER; note = Nucleotide with phosphorothioate linkage
  modified_base 10: mod_base = OTHER; note = Thymine with phosphorothioate linkage
  modified_base 11: mod_base = OTHER; note = Nucleotide with phosphorothioate linkage
  modified_base 12: mod_base = OTHER; note = Nucleotide with phosphorothioate linkage
  modified_base 13: mod_base = OTHER; note = 5-methylcytosine with phosphorothioate linkage
  modified_base 14: mod_base = OTHER; note = Nucleotide with phosphorothioate linkage
  modified_base 15: mod_base = OTHER; note = Nucleotide with phosphorothioate linkage
  modified_base 16: mod_base = OTHER; note = 2'-O-methoxyethyl modified nucleotide with phosphorothioate linkage
  modified_base 17: mod_base = OTHER; note = Locked nucleic acid with phosphorothioate linkage
  modified_base 18: mod_base = OTHER; note = 2'-O-methoxyethyl modified thymine with phosphorothioate linkage
  modified_base 19: mod_base = OTHER; note = 2'-O-methoxyethyl modified nucleotide with phosphorothioate linkage
  modified_base 20: mod_base = OTHER; note = 2'-O-methoxyethyl 5-methylcytosine
  misc_feature 1..5: note = RNA
  misc_feature 6..15: note = DNA
  misc_feature 16..20: note = RNA
gcagaggtgtagcgaagtgc

SEQ ID NO: 1075 - DNA, 20 bp, synthetic construct
  source 1..20: mol_type = other DNA
  modified_base 1: mod_base = OTHER; note = 2'-O-methoxyethyl modified nucleotide with phosphorothioate linkage
  modified_base 2: mod_base = OTHER; note = 2'-O-methoxyethyl 5-methylcytosine with phosphorothioate linkage
  modified_base 3: mod_base = OTHER; note = 2'-O-methoxyethyl modified nucleotide with phosphorothioate linkage
  modified_base 4: mod_base = OTHER; note = 2'-O-methoxyethyl modified nucleotide with phosphorothioate linkage
  modified_base 5: mod_base = OTHER; note = 2'-O-methoxyethyl modified nucleotide with phosphorothioate linkage
  modified_base 6: mod_base = OTHER; note = Nucleotide with phosphorothioate linkage
  modified_base 7: mod_base = OTHER; note = Nucleotide with phosphorothioate linkage
  modified_base 8: mod_base = OTHER; note = Thymine with phosphorothioate linkage
  modified_base 9: mod_base = OTHER; note = Nucleotide with phosphorothioate linkage
  modified_base 10: mod_base = OTHER; note = Thymine with phosphorothioate linkage
  modified_base 11: mod_base = OTHER; note = Nucleotide with phosphorothioate linkage
  modified_base 12: mod_base = OTHER; note = Nucleotide with phosphorothioate linkage
  modified_base 13: mod_base = OTHER; note = 5-methylcytosine with phosphorothioate linkage
  modified_base 14: mod_base = OTHER; note = Nucleotide with phosphorothioate linkage
  modified_base 15: mod_base = OTHER; note = Nucleotide with phosphorothioate linkage
  modified_base 16: mod_base = OTHER; note = 2'-O-methoxyethyl modified nucleotide with phosphorothioate linkage
  modified_base 17: mod_base = OTHER; note = 2'-O-methoxyethyl modified nucleotide with phosphorothioate linkage
  modified_base 18: mod_base = OTHER; note = Locked thymine with phosphorothioate linkage
  modified_base 19: mod_base = OTHER; note = 2'-O-methoxyethyl modified nucleotide with phosphorothioate linkage
  modified_base 20: mod_base = OTHER; note = 2'-O-methoxyethyl 5-methylcytosine
  misc_feature 1..5: note = RNA
  misc_feature 6..15: note = DNA
  misc_feature 16..20: note = RNA
gcagaggtgtagcgaagtgc

SEQ ID NO: 1076 - DNA, 20 bp, synthetic construct
  source 1..20: mol_type = other DNA
  modified_base 1: mod_base = OTHER; note = 2'-O-methoxyethyl modified nucleotide with phosphorothioate linkage
  modified_base 2: mod_base = OTHER; note = 2'-O-methoxyethyl 5-methylcytosine with phosphorothioate linkage
  modified_base 3: mod_base = OTHER; note = 2'-O-methoxyethyl modified nucleotide with phosphorothioate linkage
  modified_base 4: mod_base = OTHER; note = 2'-O-methoxyethyl modified nucleotide with phosphorothioate linkage
  modified_base 5: mod_base = OTHER; note = 2'-O-methoxyethyl modified nucleotide with phosphorothioate linkage
  modified_base 6: mod_base = OTHER; note = Nucleotide with phosphorothioate linkage
  modified_base 7: mod_base = OTHER; note = Nucleotide with phosphorothioate linkage
  modified_base 8: mod_base = OTHER; note = Thymine with phosphorothioate linkage
  modified_base 9: mod_base = OTHER; note = Nucleotide with phosphorothioate linkage
  modified_base 10: mod_base = OTHER; note = Thymine with phosphorothioate linkage
  modified_base 11: mod_base = OTHER; note = Nucleotide with phosphorothioate linkage
  modified_base 12: mod_base = OTHER; note = Nucleotide with phosphorothioate linkage
  modified_base 13: mod_base = OTHER; note = 5-methylcytosine with phosphorothioate linkage
  modified_base 14: mod_base = OTHER; note = Nucleotide with phosphorothioate linkage
  modified_base 15: mod_base = OTHER; note = Nucleotide with phosphorothioate linkage
  modified_base 16: mod_base = OTHER; note = 2'-O-methoxyethyl modified nucleotide with phosphorothioate linkage
  modified_base 17: mod_base = OTHER; note = 2'-O-methoxyethyl modified nucleotide with phosphorothioate linkage
  modified_base 18: mod_base = OTHER; note = 2'-O-methoxyethyl modified thymine with phosphorothioate linkage
  modified_base 19: mod_base = OTHER; note = Locked nucleic acid with phosphorothioate linkage
  modified_base 20: mod_base = OTHER; note = 2'-O-methoxyethyl 5-methylcytosine
  misc_feature 1..5: note = RNA
  misc_feature 6..15: note = DNA
  misc_feature 16..20: note = RNA
gcagaggtgtagcgaagtgc

SEQ ID NO: 1077 - DNA, 20 bp, synthetic construct
  source 1..20: mol_type = other DNA
  modified_base 1: mod_base = OTHER; note = 2'-O-methoxyethyl modified nucleotide with phosphorothioate linkage
  modified_base 2: mod_base = OTHER; note = 2'-O-methoxyethyl 5-methylcytosine with phosphorothioate linkage
  modified_base 3: mod_base = OTHER; note = 2'-O-methoxyethyl modified nucleotide with phosphorothioate linkage
  modified_base 4: mod_base = OTHER; note = 2'-O-methoxyethyl modified nucleotide with phosphorothioate linkage
  modified_base 5: mod_base = OTHER; note = 2'-O-methoxyethyl modified nucleotide with phosphorothioate linkage
  modified_base 6: mod_base = OTHER; note = Nucleotide with phosphorothioate linkage
  modified_base 7: mod_base = OTHER; note = Nucleotide with phosphorothioate linkage
  modified_base 8: mod_base = OTHER; note = Thymine with phosphorothioate linkage
  modified_base 9: mod_base = OTHER; note = Nucleotide with phosphorothioate linkage
  modified_base 10: mod_base = OTHER; note = Thymine with phosphorothioate linkage
  modified_base 11: mod_base = OTHER; note = Nucleotide with phosphorothioate linkage
  modified_base 12: mod_base = OTHER; note = Nucleotide with phosphorothioate linkage
  modified_base 13: mod_base = OTHER; note = 5-methylcytosine with phosphorothioate linkage
  modified_base 14: mod_base = OTHER; note = Nucleotide with phosphorothioate linkage
  modified_base 15: mod_base = OTHER; note = Nucleotide with phosphorothioate linkage
  modified_base 16: mod_base = OTHER; note = 2'-O-methoxyethyl modified nucleotide with phosphorothioate linkage
  modified_base 17: mod_base = OTHER; note = 2'-O-methoxyethyl modified nucleotide with phosphorothioate linkage
  modified_base 18: mod_base = OTHER; note = 2'-O-methoxyethyl modified thymine with phosphorothioate linkage
  modified_base 19: mod_base = OTHER; note = 2'-O-methoxyethyl modified nucleotide with phosphorothioate linkage
  modified_base 20: mod_base = OTHER; note = Locked 5-methylcytosine
  misc_feature 1..5: note = RNA
  misc_feature 6..15: note = DNA
  misc_feature 16..20: note = RNA
gcagaggtgtagcgaagtgc

SEQ ID NO: 1078 - DNA, 20 bp, synthetic construct
  source 1..20: mol_type = other DNA
  modified_base 1: mod_base = OTHER; note = 2'-O-methoxyethyl modified nucleotide with phosphorothioate linkage
  modified_base 2: mod_base = OTHER; note = 2'-O-methoxyethyl 5-methylcytosine with phosphorothioate linkage
  modified_base 3: mod_base = OTHER; note = 2'-O-methoxyethyl modified nucleotide with phosphorothioate linkage
  modified_base 4: mod_base = OTHER; note = 2'-O-methoxyethyl modified nucleotide with phosphorothioate linkage
  modified_base 5: mod_base = OTHER; note = 2'-O-methoxyethyl modified nucleotide with phosphorothioate linkage
  modified_base 6: mod_base = OTHER; note = Nucleotide with phosphorothioate linkage
  modified_base 7: mod_base = OTHER; note = Nucleotide with phosphorothioate linkage
  modified_base 8: mod_base = OTHER; note = Thymine with phosphorothioate linkage
  modified_base 9: mod_base = OTHER; note = Nucleotide with phosphorothioate linkage
  modified_base 10: mod_base = OTHER; note = Nucleotide with phosphorothioate linkage
  modified_base 11: mod_base = OTHER; note = Nucleotide with phosphorothioate linkage
  modified_base 12: mod_base = OTHER; note = Nucleotide with phosphorothioate linkage
  modified_base 13: mod_base = OTHER; note = 5-methylcytosine with phosphorothioate linkage
  modified_base 14: mod_base = OTHER; note = Nucleotide with phosphorothioate linkage
  modified_base 15: mod_base = OTHER; note = Nucleotide with phosphorothioate linkage
  modified_base 16: mod_base = OTHER; note = 2'-O-methoxyethyl modified nucleotide with phosphorothioate linkage
  modified_base 17: mod_base = OTHER; note = 2'-O-methoxyethyl modified nucleotide with phosphorothioate linkage
  modified_base 18: mod_base = OTHER; note = 2'-O-methoxyethyl modified thymine with phosphorothioate linkage
  modified_base 19: mod_base = OTHER; note = 2'-O-methoxyethyl modified nucleotide with phosphorothioate linkage
  modified_base 20: mod_base = OTHER; note = 2'-O-methoxyethyl 5-methylcytosine
  misc_feature 1..5: note = RNA
  misc_feature 6..15: note = DNA
  misc_feature 16..20: note = RNA
gcagaggtgaagcgaagtgc

SEQ ID NO: 1079 - DNA, 20 bp, synthetic construct
  source 1..20: mol_type = other DNA
  modified_base 1: mod_base = OTHER; note = 2'-O-methoxyethyl modified nucleotide with phosphorothioate linkage
  modified_base 2: mod_base = OTHER; note = 2'-O-methoxyethyl 5-methylcytosine with phosphorothioate linkage
  modified_base 3: mod_base = OTHER; note = 2'-O-methoxyethyl modified nucleotide with phosphorothioate linkage
  modified_base 4: mod_base = OTHER; note = 2'-O-methoxyethyl modified nucleotide with phosphorothioate linkage
  modified_base 5: mod_base = OTHER; note = Nucleotide with phosphorothioate linkage
  modified_base 6: mod_base = OTHER; note = Nucleotide with phosphorothioate linkage
  modified_base 7: mod_base = OTHER; note = Nucleotide with phosphorothioate linkage
  modified_base 8: mod_base = OTHER; note = Thymine with phosphorothioate linkage
  modified_base 9: mod_base = OTHER; note = Nucleotide with phosphorothioate linkage
  modified_base 10: mod_base = OTHER; note = 2'-O-methoxyethyl modified nucleotide with phosphorothioate linkage
  modified_base 11: mod_base = OTHER; note = Nucleotide with phosphorothioate linkage
  modified_base 12: mod_base = OTHER; note = Nucleotide with phosphorothioate linkage
  modified_base 13: mod_base = OTHER; note = 5-methylcytosine with phosphorothioate linkage
  modified_base 14: mod_base = OTHER; note = Nucleotide with phosphorothioate linkage
  modified_base 15: mod_base = OTHER; note = Nucleotide with phosphorothioate linkage
  modified_base 16: mod_base = OTHER; note = 2'-O-methoxyethyl modified nucleotide with phosphorothioate linkage
  modified_base 17: mod_base = OTHER; note = Locked nucleic acid with phosphorothioate linkage
  modified_base 18: mod_base = OTHER; note = 2'-O-methoxyethyl modified thymine with phosphorothioate linkage
  modified_base 19: mod_base = OTHER; note = Locked nucleic acid with phosphorothioate linkage
  modified_base 20: mod_base = OTHER; note = Locked 5-methylcytosine
  misc_feature 1..4: note = RNA
  misc_feature 5..9: note = DNA
  misc_feature 10: note = RNA
  misc_feature 11..15: note = DNA
  misc_feature 16..20: note = RNA
gcagaggtgaagcgaagtgc

SEQ ID NO: 1080 - DNA, 20 bp, synthetic construct
  source 1..20: mol_type = other DNA
  modified_base 1: mod_base = OTHER; note = 2'-O-methoxyethyl 5-methylcytosine with phosphorothioate linkage
  modified_base 2: mod_base = OTHER; note = Locked nucleic acid with phosphorothioate linkage
  modified_base 3: mod_base = OTHER; note = 2'-O-methoxyethyl modified nucleotide with phosphorothioate linkage
  modified_base 4: mod_base = OTHER; note = 2'-O-methoxyethyl modified nucleotide with phosphorothioate linkage
  modified_base 5: mod_base = OTHER; note = 2'-O-methoxyethyl modified nucleotide with phosphorothioate linkage
  modified_base 6: mod_base = OTHER; note = Nucleotide with phosphorothioate linkage
  modified_base 7: mod_base = OTHER; note = Thymine with phosphorothioate linkage
  modified_base 8: mod_base = OTHER; note = Nucleotide with phosphorothioate linkage
  modified_base 9: mod_base = OTHER; note = Nucleotide with phosphorothioate linkage
  modified_base 10: mod_base = OTHER; note = Nucleotide with phosphorothioate linkage
  modified_base 11: mod_base = OTHER; note = Nucleotide with phosphorothioate linkage
  modified_base 12: mod_base = OTHER; note = 5-methylcytosine with phosphorothioate linkage
  modified_base 13: mod_base = OTHER; note = Nucleotide with phosphorothioate linkage
  modified_base 14: mod_base = OTHER; note = Nucleotide with phosphorothioate linkage
  modified_base 15: mod_base = OTHER; note = Nucleotide with phosphorothioate linkage
  modified_base 16: mod_base = OTHER; note = 2'-O-methoxyethyl modified nucleotide with phosphorothioate linkage
  modified_base 17: mod_base = OTHER; note = 2'-O-methoxyethyl modified thymine with phosphorothioate linkage
  modified_base 18: mod_base = OTHER; note = Locked nucleic acid with phosphorothioate linkage
  modified_base 19: mod_base = OTHER; note = 2'-O-methoxyethyl 5-methylcytosine with phosphorothioate linkage
  modified_base 20: mod_base = OTHER; note = 2'-O-methoxyethyl modified nucleotide
  misc_feature 1..5: note = RNA
  misc_feature 6..15: note = DNA
  misc_feature 16..20: note = RNA
cagaggtgaagcgaagtgca

SEQ ID NO: 1081 - DNA, 20 bp, synthetic construct
  source 1..20: mol_type = other DNA
  modified_base 1: mod_base = OTHER; note = 2'-O-methoxyethyl modified nucleotide with phosphorothioate linkage
  modified_base 2: mod_base = OTHER; note = 2'-O-methoxyethyl 5-methylcytosine with phosphorothioate linkage
  modified_base 3: mod_base = OTHER; note = 2'-O-methoxyethyl modified nucleotide with phosphorothioate linkage
  modified_base 4: mod_base = OTHER; note = 2'-O-methoxyethyl modified nucleotide with phosphorothioate linkage
  modified_base 5: mod_base = OTHER; note = 2'-O-methoxyethyl modified nucleotide with phosphorothioate linkage
  modified_base 6: mod_base = OTHER; note = Nucleotide with phosphorothioate linkage
  modified_base 7: mod_base = OTHER; note = Nucleotide with phosphorothioate linkage
  modified_base 8: mod_base = OTHER; note = Thymine with phosphorothioate linkage
  modified_base 9: mod_base = OTHER; note = 2'-O-methyl-3'-xylo modified 5-methylcytosine with phosphorothioate linkage
  modified_base 10: mod_base = OTHER; note = Nucleotide with phosphorothioate linkage
  modified_base 11: mod_base = OTHER; note = Nucleotide with phosphorothioate linkage
  modified_base 12: mod_base = OTHER; note = Nucleotide with phosphorothioate linkage
  modified_base 13: mod_base = OTHER; note = 5-methylcytosine with phosphorothioate linkage
  modified_base 14: mod_base = OTHER; note = Nucleotide with phosphorothioate linkage
  modified_base 15: mod_base = OTHER; note = Nucleotide with phosphorothioate linkage
  modified_base 16: mod_base = OTHER; note = 2'-O-methoxyethyl modified nucleotide with phosphorothioate linkage
  modified_base 17: mod_base = OTHER; note = 2'-O-methoxyethyl modified nucleotide with phosphorothioate linkage
  modified_base 18: mod_base = OTHER; note = 2'-O-methoxyethyl modified thymine with phosphorothioate linkage
  modified_base 19: mod_base = OTHER; note = 2'-O-methoxyethyl modified nucleotide with phosphorothioate linkage
  modified_base 20: mod_base = OTHER; note = 2'-O-methoxyethyl 5-methylcytosine
  misc_feature 1..5: note = RNA
  misc_feature 6..8: note = DNA
  misc_feature 9: note = RNA
  misc_feature 10..15: note = DNA
  misc_feature 16..20: note = RNA
gcagaggtcaagcgaagtgc

SEQ ID NO: 1082 - DNA, 20 bp, synthetic construct
  source 1..20: mol_type = other DNA
  modified_base 1: mod_base = OTHER; note = 2'-O-methoxyethyl modified nucleotide with phosphorothioate linkage
  modified_base 2: mod_base = OTHER; note = 2'-O-methoxyethyl 5-methylcytosine with phosphorothioate linkage
  modified_base 3: mod_base = OTHER; note = 2'-O-methoxyethyl modified nucleotide with phosphorothioate linkage
  modified_base 4: mod_base = OTHER; note = 2'-O-methoxyethyl modified nucleotide with phosphorothioate linkage
  modified_base 5: mod_base = OTHER; note = 2'-O-methoxyethyl modified nucleotide with phosphorothioate linkage
  modified_base 6: mod_base = OTHER; note = Nucleotide with phosphorothioate linkage
  modified_base 7: mod_base = OTHER; note = Nucleotide with phosphorothioate linkage
  modified_base 8: mod_base = OTHER; note = Thymine with phosphorothioate linkage
  modified_base 9: mod_base = OTHER; note = 2'-O-methyl-3'-xylo modified thymine with phosphorothioate linkage
  modified_base 10: mod_base = OTHER; note = Nucleotide with phosphorothioate linkage
  modified_base 11: mod_base = OTHER; note = Nucleotide with phosphorothioate linkage
  modified_base 12: mod_base = OTHER; note = Nucleotide with phosphorothioate linkage
  modified_base 13: mod_base = OTHER; note = 5-methylcytosine with phosphorothioate linkage
  modified_base 14: mod_base = OTHER; note = Nucleotide with phosphorothioate linkage
  modified_base 15: mod_base = OTHER; note = Nucleotide with phosphorothioate linkage
  modified_base 16: mod_base = OTHER; note = 2'-O-methoxyethyl modified nucleotide with phosphorothioate linkage
  modified_base 17: mod_base = OTHER; note = 2'-O-methoxyethyl modified nucleotide with phosphorothioate linkage
  modified_base 18: mod_base = OTHER; note = 2'-O-methoxyethyl modified thymine with phosphorothioate linkage
  modified_base 19: mod_base = OTHER; note = 2'-O-methoxyethyl modified nucleotide with phosphorothioate linkage
  modified_base 20: mod_base = OTHER; note = 2'-O-methoxyethyl 5-methylcytosine
  misc_feature 1..5: note = RNA
  misc_feature 6..8: note = DNA
  misc_feature 9: note = RNA
  misc_feature 10..15: note = DNA
  misc_feature 16..20: note = RNA
gcagaggttaagcgaagtgc

SEQ ID NO: 1083 - DNA, 20 bp, synthetic construct
  source 1..20: mol_type = other DNA
  modified_base 1: mod_base = OTHER; note = 2'-O-methoxyethyl modified nucleotide with phosphorothioate linkage
  modified_base 2: mod_base = OTHER; note = 2'-O-methoxyethyl 5-methylcytosine with phosphorothioate linkage
  modified_base 3: mod_base = OTHER; note = 2'-O-methoxyethyl modified nucleotide with phosphorothioate linkage
  modified_base 4: mod_base = OTHER; note = 2'-O-methoxyethyl modified nucleotide with phosphorothioate linkage
  modified_base 5: mod_base = OTHER; note = 2'-O-methoxyethyl modified nucleotide with phosphorothioate linkage
  modified_base 6: mod_base = OTHER; note = Nucleotide with phosphorothioate linkage
  modified_base 7: mod_base = OTHER; note = Nucleotide with phosphorothioate linkage
  modified_base 8: mod_base = OTHER; note = Thymine with phosphorothioate linkage
  modified_base 9: mod_base = OTHER; note = Nucleotide with phosphorothioate linkage
  modified_base 10: mod_base = OTHER; note = 2'-O-methyl-3'-xylo modified nucleotide with phosphorothioate linkage
  modified_base 11: mod_base = OTHER; note = Nucleotide with phosphorothioate linkage
  modified_base 12: mod_base = OTHER; note = Nucleotide with phosphorothioate linkage
  modified_base 13: mod_base = OTHER; note = 5-methylcytosine with phosphorothioate linkage
  modified_base 14: mod_base = OTHER; note = Nucleotide with phosphorothioate linkage
  modified_base 15: mod_base = OTHER; note = Nucleotide with phosphorothioate linkage
  modified_base 16: mod_base = OTHER; note = 2'-O-methoxyethyl modified nucleotide with phosphorothioate linkage
  modified_base 17: mod_base = OTHER; note = 2'-O-methoxyethyl modified nucleotide with phosphorothioate linkage
  modified_base 18: mod_base = OTHER; note = 2'-O-methoxyethyl modified thymine with phosphorothioate linkage
  modified_base 19: mod_base = OTHER; note = 2'-O-methoxyethyl modified nucleotide with phosphorothioate linkage
  modified_base 20: mod_base = OTHER; note = 2'-O-methoxyethyl 5-methylcytosine
  misc_feature 1..5: note = RNA
  misc_feature 6..9: note = DNA
  misc_feature 10: note = RNA
  misc_feature 11..15: note = DNA
  misc_feature 16..20: note = RNA
gcagaggtggagcgaagtgc

SEQ ID NO: 1084 - DNA, 20 bp, synthetic construct
  source 1..20: mol_type = other DNA
  modified_base 1: mod_base = OTHER; note = 2'-O-methoxyethyl modified nucleotide with phosphorothioate linkage
  modified_base 2: mod_base = OTHER; note = 2'-O-methoxyethyl 5-methylcytosine with phosphorothioate linkage
  modified_base 3: mod_base = OTHER; note = 2'-O-methoxyethyl modified nucleotide with phosphorothioate linkage
  modified_base 4: mod_base = OTHER; note = 2'-O-methoxyethyl modified nucleotide with phosphorothioate linkage
  modified_base 5: mod_base = OTHER; note = 2'-O-methoxyethyl modified nucleotide with phosphorothioate linkage
  modified_base 6: mod_base = OTHER; note = Nucleotide with phosphorothioate linkage
  modified_base 7: mod_base = OTHER; note = Nucleotide with phosphorothioate linkage
  modified_base 8: mod_base = OTHER; note = Thymine with phosphorothioate linkage
  modified_base 9: mod_base = OTHER; note = Nucleotide with phosphorothioate linkage
  modified_base 10: mod_base = OTHER; note = Nucleotide with phosphorothioate linkage
  modified_base 11: mod_base = OTHER; note = 2'-O-methyl-3'-xylo modified thymine with phosphorothioate linkage
  modified_base 12: mod_base = OTHER; note = Nucleotide with phosphorothioate linkage
  modified_base 13: mod_base = OTHER; note = 5-methylcytosine with phosphorothioate linkage
  modified_base 14: mod_base = OTHER; note = Nucleotide with phosphorothioate linkage
  modified_base 15: mod_base = OTHER; note = Nucleotide with phosphorothioate linkage
  modified_base 16: mod_base = OTHER; note = 2'-O-methoxyethyl modified nucleotide with phosphorothioate linkage
  modified_base 17: mod_base = OTHER; note = 2'-O-methoxyethyl modified nucleotide with phosphorothioate linkage
  modified_base 18: mod_base = OTHER; note = 2'-O-methoxyethyl modified thymine with phosphorothioate linkage
  modified_base 19: mod_base = OTHER; note = 2'-O-methoxyethyl modified nucleotide with phosphorothioate linkage
  modified_base 20: mod_base = OTHER; note = 2'-O-methoxyethyl 5-methylcytosine
  misc_feature 1..5: note = RNA
  misc_feature 6..10: note = DNA
  misc_feature 11: note = RNA
  misc_feature 12..15: note = DNA
  misc_feature 16..20: note = RNA
gcagaggtgatgcgaagtgc

SEQ ID NO: 1085 - DNA, 20 bp, synthetic construct
  source 1..20: mol_type = other DNA
  modified_base 1: mod_base = OTHER; note = 2'-O-methoxyethyl modified nucleotide with phosphorothioate linkage
  modified_base 2: mod_base = OTHER; note = 2'-O-methoxyethyl 5-methylcytosine with phosphorothioate linkage
  modified_base 3: mod_base = OTHER; note = 2'-O-methoxyethyl modified nucleotide with phosphorothioate linkage
  modified_base 4: mod_base = OTHER; note = 2'-O-methoxyethyl modified nucleotide with phosphorothioate linkage
  modified_base 5: mod_base = OTHER; note = 2'-O-methoxyethyl modified nucleotide with phosphorothioate linkage
  modified_base 6: mod_base = OTHER; note = Nucleotide with phosphorothioate linkage
  modified_base 7: mod_base = OTHER; note = Nucleotide with phosphorothioate linkage
  modified_base 8: mod_base = OTHER; note = Thymine with phosphorothioate linkage
  modified_base 9: mod_base = OTHER; note = Nucleotide with phosphorothioate linkage
  modified_base 10: mod_base = OTHER; note = Nucleotide with phosphorothioate linkage
  modified_base 11: mod_base = OTHER; note = Nucleotide with phosphorothioate linkage
  modified_base 12: mod_base = OTHER; note = 2'-O-methyl-3'-xylo modified nucleotide with phosphorothioate linkage
  modified_base 13: mod_base = OTHER; note = 5-methylcytosine with phosphorothioate linkage
  modified_base 14: mod_base = OTHER; note = Nucleotide with phosphorothioate linkage
  modified_base 15: mod_base = OTHER; note = Nucleotide with phosphorothioate linkage
  modified_base 16: mod_base = OTHER; note = 2'-O-methoxyethyl modified nucleotide with phosphorothioate linkage
  modified_base 17: mod_base = OTHER; note = 2'-O-methoxyethyl modified nucleotide with phosphorothioate linkage
  modified_base 18: mod_base = OTHER; note = 2'-O-methoxyethyl modified thymine with phosphorothioate linkage
  modified_base 19: mod_base = OTHER; note = 2'-O-methoxyethyl modified nucleotide with phosphorothioate linkage
  modified_base 20: mod_base = OTHER; note = 2'-O-methoxyethyl 5-methylcytosine
  misc_feature 1..5: note = RNA
  misc_feature 6..11: note = DNA
  misc_feature 12: note = RNA
  misc_feature 13..15: note = DNA
  misc_feature 16..20: note = RNA
gcagaggtgaaacgaagtgc

SEQ ID NO: 1086 - DNA, 20 bp, synthetic construct
  source 1..20: mol_type = other DNA
  modified_base 1: mod_base = OTHER; note = 2'-O-methoxyethyl modified nucleotide with phosphorothioate linkage
  modified_base 2: mod_base = OTHER; note = 2'-O-methoxyethyl 5-methylcytosine with phosphorothioate linkage
  modified_base 3: mod_base = OTHER; note = 2'-O-methoxyethyl modified nucleotide with phosphorothioate linkage
  modified_base 4: mod_base = OTHER; note = 2'-O-methoxyethyl modified nucleotide with phosphorothioate linkage
  modified_base 5: mod_base = OTHER; note = 2'-O-methoxyethyl modified nucleotide with phosphorothioate linkage
  modified_base 6: mod_base = OTHER; note = Nucleotide with phosphorothioate linkage
  modified_base 7: mod_base = OTHER; note = Nucleotide with phosphorothioate linkage
  modified_base 8: mod_base = OTHER; note = Thymine with phosphorothioate linkage
  modified_base 9: mod_base = OTHER; note = Nucleotide with phosphorothioate linkage
  modified_base 10: mod_base = OTHER; note = Nucleotide with phosphorothioate linkage
  modified_base 11: mod_base = OTHER; note = Nucleotide with phosphorothioate linkage
  modified_base 12: mod_base = OTHER; note = 2'-O-methyl-3'-xylo modified 5-methylcytosine with phosphorothioate linkage
  modified_base 13: mod_base = OTHER; note = 5-methylcytosine with phosphorothioate linkage
  modified_base 14: mod_base = OTHER; note = Nucleotide with phosphorothioate linkage
  modified_base 15: mod_base = OTHER; note = Nucleotide with phosphorothioate linkage
  modified_base 16: mod_base = OTHER; note = 2'-O-methoxyethyl modified nucleotide with phosphorothioate linkage
  modified_base 17: mod_base = OTHER; note = 2'-O-methoxyethyl modified nucleotide with phosphorothioate linkage
  modified_base 18: mod_base = OTHER; note = 2'-O-methoxyethyl modified thymine with phosphorothioate linkage
  modified_base 19: mod_base = OTHER; note = 2'-O-methoxyethyl modified nucleotide with phosphorothioate linkage
  modified_base 20: mod_base = OTHER; note = 2'-O-methoxyethyl 5-methylcytosine
  misc_feature 1..5: note = RNA
  misc_feature 6..11: note = DNA
  misc_feature 12: note = RNA
  misc_feature 13..15: note = DNA
  misc_feature 16..20: note = RNA
gcagaggtgaaccgaagtgc

SEQ ID NO: 1087 - DNA, 20 bp, synthetic construct
  source 1..20: mol_type = other DNA
  modified_base 1: mod_base = OTHER; note = 2'-O-methoxyethyl modified nucleotide with phosphorothioate linkage
  modified_base 2: mod_base = OTHER; note = 2'-O-methoxyethyl 5-methylcytosine with phosphorothioate linkage
  modified_base 3: mod_base = OTHER; note = 2'-O-methoxyethyl modified nucleotide with phosphorothioate linkage
  modified_base 4: mod_base = OTHER; note = 2'-O-methoxyethyl modified nucleotide with phosphorothioate linkage
  modified_base 5: mod_base = OTHER; note = 2'-O-methoxyethyl modified nucleotide with phosphorothioate linkage
  modified_base 6: mod_base = OTHER; note = Nucleotide with phosphorothioate linkage
  modified_base 7: mod_base = OTHER; note = Nucleotide with phosphorothioate linkage
  modified_base 8: mod_base = OTHER; note = Thymine with phosphorothioate linkage
  modified_base 9: mod_base = OTHER; note = Nucleotide with phosphorothioate linkage
  modified_base 10: mod_base = OTHER; note = Nucleotide with phosphorothioate linkage
  modified_base 11: mod_base = OTHER; note = Nucleotide with phosphorothioate linkage
  modified_base 12: mod_base = OTHER; note = 2'-O-methyl-3'-xylo modified thymine with phosphorothioate linkage
  modified_base 13: mod_base = OTHER; note = 5-methylcytosine with phosphorothioate linkage
  modified_base 14: mod_base = OTHER; note = Nucleotide with phosphorothioate linkage
  modified_base 15: mod_base = OTHER; note = Nucleotide with phosphorothioate linkage
  modified_base 16: mod_base = OTHER; note = 2'-O-methoxyethyl modified nucleotide with phosphorothioate linkage
  modified_base 17: mod_base = OTHER; note = 2'-O-methoxyethyl modified nucleotide with phosphorothioate linkage
  modified_base 18: mod_base = OTHER; note = 2'-O-methoxyethyl modified thymine with phosphorothioate linkage
  modified_base 19: mod_base = OTHER; note = 2'-O-methoxyethyl modified nucleotide with phosphorothioate linkage
  modified_base 20: mod_base = OTHER; note = 2'-O-methoxyethyl 5-methylcytosine
  misc_feature 1..5: note = RNA
  misc_feature 6..11: note = DNA
  misc_feature 12: note = RNA
  misc_feature 13..15: note = DNA
  misc_feature 16..20: note = RNA
gcagaggtgaatcgaagtgc

SEQ ID NO: 1088 - DNA, 20 bp, synthetic construct
  source 1..20: mol_type = other DNA
  modified_base 1: mod_base = OTHER; note = 2'-O-methoxyethyl modified nucleotide with phosphorothioate linkage
  modified_base 2: mod_base = OTHER; note = 2'-O-methoxyethyl 5-methylcytosine with phosphorothioate linkage
  modified_base 3: mod_base = OTHER; note = 2'-O-methoxyethyl modified nucleotide with phosphorothioate linkage
  modified_base 4: mod_base = OTHER; note = Locked nucleic acid with phosphorothioate linkage
  modified_base 5: mod_base = OTHER; note = 2'-O-methoxyethyl modified nucleotide with phosphorothioate linkage
  modified_base 6: mod_base = OTHER; note = Nucleotide with phosphorothioate linkage
  modified_base 7: mod_base = OTHER; note = Nucleotide with phosphorothioate linkage
  modified_base 8: mod_base = OTHER; note = Thymine with phosphorothioate linkage
  modified_base 9: mod_base = OTHER; note = Nucleotide with phosphorothioate linkage
  modified_base 10: mod_base = OTHER; note = Nucleotide with phosphorothioate linkage
  modified_base 11: mod_base = OTHER; note = 2'-O-methyl modified abasic nucleotide with phosphorothioate linkage
  modified_base 12: mod_base = OTHER; note = Nucleotide with phosphorothioate linkage
  modified_base 13: mod_base = OTHER; note = 5-methylcytosine with phosphorothioate linkage
  modified_base 14: mod_base = OTHER; note = Nucleotide with phosphorothioate linkage
  modified_base 15: mod_base = OTHER; note = Nucleotide with phosphorothioate linkage
  modified_base 16: mod_base = OTHER; note = Locked nucleic acid with phosphorothioate linkage
  modified_base 17: mod_base = OTHER; note = 2'-O-methoxyethyl modified nucleotide with phosphorothioate linkage
  modified_base 18: mod_base = OTHER; note = 2'-O-methoxyethyl modified thymine with phosphorothioate linkage
  modified_base 19: mod_base = OTHER; note = 2'-O-methoxyethyl modified nucleotide with phosphorothioate linkage
  modified_base 20: mod_base = OTHER; note = 2'-O-methoxyethyl 5-methylcytosine
  misc_feature 1..5: note = RNA
  misc_feature 6..10: note = DNA
  misc_feature 11: note = RNA
  misc_feature 12..15: note = DNA
  misc_feature 16..20: note = RNA
gcagaggtgangcgaagtgc

SEQ ID NO: 1089 - DNA, 20 bp, synthetic construct
  source 1..20: mol_type = other DNA
  modified_base 1: mod_base = OTHER; note = Locked nucleic acid with phosphorothioate linkage
  modified_base 2: mod_base = OTHER; note = Locked 5-methylcytosine with phosphorothioate linkage
  modified_base 3: mod_base = OTHER; note = 2'-O-methoxyethyl modified nucleotide with phosphorothioate linkage
  modified_base 4: mod_base = OTHER; note = 2'-O-methoxyethyl modified nucleotide with phosphorothioate linkage
  modified_base 5: mod_base = OTHER; note = 2'-O-methoxyethyl modified nucleotide with phosphorothioate linkage
  modified_base 6: mod_base = OTHER; note = Nucleotide with phosphorothioate linkage
  modified_base 7: mod_base = OTHER; note = Nucleotide with phosphorothioate linkage
  modified_base 8: mod_base = OTHER; note = Thymine with phosphorothioate linkage
  modified_base 9: mod_base = OTHER; note = Nucleotide with phosphorothioate linkage
  modified_base 10: mod_base = OTHER; note = Thymine with phosphorothioate linkage
  modified_base 11: mod_base = OTHER; note = Nucleotide with phosphorothioate linkage
  modified_base 12: mod_base = OTHER; note = Nucleotide with phosphorothioate linkage
  modified_base 13: mod_base = OTHER; note = 5-methylcytosine with phosphorothioate linkage
  modified_base 14: mod_base = OTHER; note = Nucleotide with phosphorothioate linkage
  modified_base 15: mod_base = OTHER; note = Nucleotide with phosphorothioate linkage
  modified_base 16: mod_base = OTHER; note = 2'-O-methoxyethyl modified nucleotide with phosphorothioate linkage
  modified_base 17: mod_base = OTHER; note = 2'-O-methoxyethyl modified nucleotide with phosphorothioate linkage
  modified_base 18: mod_base = OTHER; note = 2'-O-methoxyethyl modified thymine with phosphorothioate linkage
  modified_base 19: mod_base = OTHER; note = 2'-O-methoxyethyl modified nucleotide with phosphorothioate linkage
  modified_base 20: mod_base = OTHER; note = 2'-O-methoxyethyl 5-methylcytosine
  misc_feature 1..5: note = RNA
  misc_feature 6..15: note = DNA
  misc_feature 16..20: note = RNA
gcagaggtgtagcgaagtgc

SEQ ID NO: 1090 - DNA, 20 bp, synthetic construct
  source 1..20: mol_type = other DNA
  modified_base 1: mod_base = OTHER; note = Locked nucleic acid with phosphorothioate linkage
  modified_base 2: mod_base = OTHER; note = 2'-O-methoxyethyl 5-methylcytosine with phosphorothioate linkage
  modified_base 3: mod_base = OTHER; note = Locked nucleic acid with phosphorothioate linkage
  modified_base 4: mod_base = OTHER; note = 2'-O-methoxyethyl modified nucleotide with phosphorothioate linkage
  modified_base 5: mod_base = OTHER; note = 2'-O-methoxyethyl modified nucleotide with phosphorothioate linkage
  modified_base 6: mod_base = OTHER; note = Nucleotide with phosphorothioate linkage
  modified_base 7: mod_base = OTHER; note = Nucleotide with phosphorothioate linkage
  modified_base 8: mod_base = OTHER; note = Thymine with phosphorothioate linkage
  modified_base 9: mod_base = OTHER; note = Nucleotide with phosphorothioate linkage
  modified_base 10: mod_base = OTHER; note = Thymine with phosphorothioate linkage
  modified_base 11: mod_base = OTHER; note = Nucleotide with phosphorothioate linkage
  modified_base 12: mod_base = OTHER; note = Nucleotide with phosphorothioate linkage
  modified_base 13: mod_base = OTHER; note = 5-methylcytosine with phosphorothioate linkage
  modified_base 14: mod_base = OTHER; note = Nucleotide with phosphorothioate linkage
  modified_base 15: mod_base = OTHER; note = Nucleotide with phosphorothioate linkage
  modified_base 16: mod_base = OTHER; note = 2'-O-methoxyethyl modified nucleotide with phosphorothioate linkage
  modified_base 17: mod_base = OTHER; note = 2'-O-methoxyethyl modified nucleotide with phosphorothioate linkage
  modified_base 18: mod_base = OTHER; note = 2'-O-methoxyethyl modified thymine with phosphorothioate linkage
  modified_base 19: mod_base = OTHER; note = 2'-O-methoxyethyl modified nucleotide with phosphorothioate linkage
  modified_base 20: mod_base = OTHER; note = 2'-O-methoxyethyl 5-methylcytosine
  misc_feature 1..5: note = RNA
  misc_feature 6..15: note = DNA
  misc_feature 16..20: note = RNA
gcagaggtgtagcgaagtgc

SEQ ID NO: 1091 - DNA, 20 bp, synthetic construct
  source 1..20: mol_type = other DNA
  modified_base 1: mod_base = OTHER; note = Locked nucleic acid with phosphorothioate linkage
  modified_base 2: mod_base = OTHER; note = 2'-O-methoxyethyl 5-methylcytosine with phosphorothioate linkage
  modified_base 3: mod_base = OTHER; note = 2'-O-methoxyethyl modified nucleotide with phosphorothioate linkage
  modified_base 4: mod_base = OTHER; note = Locked nucleic acid with phosphorothioate linkage
  modified_base 5: mod_base = OTHER; note = 2'-O-methoxyethyl modified nucleotide with phosphorothioate linkage
  modified_base 6: mod_base = OTHER; note = Nucleotide with phosphorothioate linkage
  modified_base 7: mod_base = OTHER; note = Nucleotide with phosphorothioate linkage
  modified_base 8: mod_base = OTHER; note = Thymine with phosphorothioate linkage
  modified_base 9: mod_base = OTHER; note = Nucleotide with phosphorothioate linkage
  modified_base 10: mod_base = OTHER; note = Thymine with phosphorothioate linkage
  modified_base 11: mod_base = OTHER; note = Nucleotide with phosphorothioate linkage
  modified_base 12: mod_base = OTHER; note = Nucleotide with phosphorothioate linkage
  modified_base 13: mod_base = OTHER; note = 5-methylcytosine with phosphorothioate linkage
  modified_base 14: mod_base = OTHER; note = Nucleotide with phosphorothioate linkage
  modified_base 15: mod_base = OTHER; note = Nucleotide with phosphorothioate linkage
  modified_base 16: mod_base = OTHER; note = 2'-O-methoxyethyl modified nucleotide with phosphorothioate linkage
  modified_base 17: mod_base = OTHER; note = 2'-O-methoxyethyl modified nucleotide with phosphorothioate linkage
  modified_base 18: mod_base = OTHER; note = 2'-O-methoxyethyl modified thymine with phosphorothioate linkage
  modified_base 19: mod_base = OTHER; note = 2'-O-methoxyethyl modified nucleotide with phosphorothioate linkage
  modified_base 20: mod_base = OTHER; note = 2'-O-methoxyethyl 5-methylcytosine
  misc_feature 1..5: note = RNA
  misc_feature 6..15: note = DNA
  misc_feature 16..20: note = RNA
gcagaggtgtagcgaagtgc

SEQ ID NO: 1092 - DNA, 20 bp, synthetic construct
  source 1..20: mol_type = other DNA
  modified_base 1: mod_base = OTHER; note = Locked nucleic acid with phosphorothioate linkage
  modified_base 2: mod_base = OTHER; note = 2'-O-methoxyethyl 5-methylcytosine with phosphorothioate linkage
  modified_base 3: mod_base = OTHER; note = 2'-O-methoxyethyl modified nucleotide with phosphorothioate linkage
  modified_base 4: mod_base = OTHER; note = 2'-O-methoxyethyl modified nucleotide with phosphorothioate linkage
  modified_base 5: mod_base = OTHER; note = Locked nucleic acid with phosphorothioate linkage
  modified_base 6: mod_base = OTHER; note = Nucleotide with phosphorothioate linkage
  modified_base 7: mod_base = OTHER; note = Nucleotide with phosphorothioate linkage
  modified_base 8: mod_base = OTHER; note = Thymine with phosphorothioate linkage
  modified_base 9: mod_base = OTHER; note = Nucleotide with phosphorothioate linkage
  modified_base 10: mod_base = OTHER; note = Thymine with phosphorothioate linkage
  modified_base 11: mod_base = OTHER; note = Nucleotide with phosphorothioate linkage
  modified_base 12: mod_base = OTHER; note = Nucleotide with phosphorothioate linkage
  modified_base 13: mod_base = OTHER; note = 5-methylcytosine with phosphorothioate linkage
  modified_base 14: mod_base = OTHER; note = Nucleotide with phosphorothioate linkage
  modified_base 15: mod_base = OTHER; note = Nucleotide with phosphorothioate linkage
  modified_base 16: mod_base = OTHER; note = 2'-O-methoxyethyl modified nucleotide with phosphorothioate linkage
  modified_base 17: mod_base = OTHER; note = 2'-O-methoxyethyl modified nucleotide with phosphorothioate linkage
  modified_base 18: mod_base = OTHER; note = 2'-O-methoxyethyl modified thymine with phosphorothioate linkage
  modified_base 19: mod_base = OTHER; note = 2'-O-methoxyethyl modified nucleotide with phosphorothioate linkage
  modified_base 20: mod_base = OTHER; note = 2'-O-methoxyethyl 5-methylcytosine
  misc_feature 1..5: note = RNA
  misc_feature 6..15: note = DNA
  misc_feature 16..20: note = RNA
gcagaggtgtagcgaagtgc

SEQ ID NO: 1093 - DNA, 20 bp, synthetic construct
  source 1..20: mol_type = other DNA
  modified_base 1: mod_base = OTHER; note = Locked nucleic acid with phosphorothioate linkage
  modified_base 2: mod_base = OTHER; note = 2'-O-methoxyethyl 5-methylcytosine with phosphorothioate linkage
  modified_base 3: mod_base = OTHER; note = 2'-O-methoxyethyl modified nucleotide with phosphorothioate linkage
  modified_base 4: mod_base = OTHER; note = 2'-O-methoxyethyl modified nucleotide with phosphorothioate linkage
  modified_base 5: mod_base = OTHER; note = 2'-O-methoxyethyl modified nucleotide with phosphorothioate linkage
  modified_base 6: mod_base = OTHER; note = Nucleotide with phosphorothioate linkage
  modified_base 7: mod_base = OTHER; note = Nucleotide with phosphorothioate linkage
  modified_base 8: mod_base = OTHER; note = Thymine with phosphorothioate linkage
  modified_base 9: mod_base = OTHER; note = Nucleotide with phosphorothioate linkage
  modified_base 10: mod_base = OTHER; note = Thymine with phosphorothioate linkage
  modified_base 11: mod_base = OTHER; note = Nucleotide with phosphorothioate linkage
  modified_base 12: mod_base = OTHER; note = Nucleotide with phosphorothioate linkage
  modified_base 13: mod_base = OTHER; note = 5-methylcytosine with phosphorothioate linkage
  modified_base 14: mod_base = OTHER; note = Nucleotide with phosphorothioate linkage
  modified_base 15: mod_base = OTHER; note = Nucleotide with phosphorothioate linkage
  modified_base 16: mod_base = OTHER; note = Locked nucleic acid with phosphorothioate linkage
  modified_base 17: mod_base = OTHER; note = 2'-O-methoxyethyl modified nucleotide with phosphorothioate linkage
  modified_base 18: mod_base = OTHER; note = 2'-O-methoxyethyl modified thymine with phosphorothioate linkage
  modified_base 19: mod_base = OTHER; note = 2'-O-methoxyethyl modified nucleotide with phosphorothioate linkage
  modified_base 20: mod_base = OTHER; note = 2'-O-methoxyethyl 5-methylcytosine
  misc_feature 1..5: note = RNA
  misc_feature 6..15: note = DNA
  misc_feature 16..20: note = RNA
gcagaggtgtagcgaagtgc

SEQ ID NO: 1094 - DNA, 20 bp, synthetic construct
  source 1..20: mol_type = other DNA
  modified_base 1: mod_base = OTHER; note = Locked nucleic acid with phosphorothioate linkage
  modified_base 2: mod_base = OTHER; note = 2'-O-methoxyethyl 5-methylcytosine with phosphorothioate linkage
  modified_base 3: mod_base = OTHER; note = 2'-O-methoxyethyl modified nucleotide with phosphorothioate linkage
  modified_base 4: mod_base = OTHER; note = 2'-O-methoxyethyl modified nucleotide with phosphorothioate linkage
  modified_base 5: mod_base = OTHER; note = 2'-O-methoxyethyl modified nucleotide with phosphorothioate linkage
  modified_base 6: mod_base = OTHER; note = Nucleotide with phosphorothioate linkage
  modified_base 7: mod_base = OTHER; note = Nucleotide with phosphorothioate linkage
  modified_base 8: mod_base = OTHER; note = Thymine with phosphorothioate linkage
  modified_base 9: mod_base = OTHER; note = Nucleotide with phosphorothioate linkage
  modified_base 10: mod_base = OTHER; note = Thymine with phosphorothioate linkage
  modified_base 11: mod_base = OTHER; note = Nucleotide with phosphorothioate linkage
  modified_base 12: mod_base = OTHER; note = Nucleotide with phosphorothioate linkage
  modified_base 13: mod_base = OTHER; note = 5-methylcytosine with phosphorothioate linkage
  modified_base 14: mod_base = OTHER; note = Nucleotide with phosphorothioate linkage
  modified_base 15: mod_base = OTHER; note = Nucleotide with phosphorothioate linkage
  modified_base 16: mod_base = OTHER; note = 2'-O-methoxyethyl modified nucleotide with phosphorothioate linkage
  modified_base 17: mod_base = OTHER; note = Locked nucleic acid with phosphorothioate linkage
  modified_base 18: mod_base = OTHER; note = 2'-O-methoxyethyl modified thymine with phosphorothioate linkage
  modified_base 19: mod_base = OTHER; note = 2'-O-methoxyethyl modified nucleotide with phosphorothioate linkage
  modified_base 20: mod_base = OTHER; note = 2'-O-methoxyethyl 5-methylcytosine
  misc_feature 1..5: note = RNA
  misc_feature 6..15: note = DNA
  misc_feature 16..20: note = RNA
gcagaggtgtagcgaagtgc

SEQ ID NO: 1095 - DNA, 20 bp, synthetic construct
  source 1..20: mol_type = other DNA
  modified_base 1: mod_base = OTHER; note = Locked nucleic acid with phosphorothioate linkage
  modified_base 2: mod_base = OTHER; note = 2'-O-methoxyethyl 5-methylcytosine with phosphorothioate linkage
  modified_base 3: mod_base = OTHER; note = 2'-O-methoxyethyl modified nucleotide with phosphorothioate linkage
  modified_base 4: mod_base = OTHER; note = 2'-O-methoxyethyl modified nucleotide with phosphorothioate linkage
  modified_base 5: mod_base = OTHER; note = 2'-O-methoxyethyl modified nucleotide with phosphorothioate linkage
  modified_base 6: mod_base = OTHER; note = Nucleotide with phosphorothioate linkage
  modified_base 7: mod_base = OTHER; note = Nucleotide with phosphorothioate linkage
  modified_base 8: mod_base = OTHER; note = Thymine with phosphorothioate linkage
  modified_base 9: mod_base = OTHER; note = Nucleotide with phosphorothioate linkage
  modified_base 10: mod_base = OTHER; note = Thymine with phosphorothioate linkage
  modified_base 11: mod_base = OTHER; note = Nucleotide with phosphorothioate linkage
  modified_base 12: mod_base = OTHER; note = Nucleotide with phosphorothioate linkage
  modified_base 13: mod_base = OTHER; note = 5-methylcytosine with phosphorothioate linkage
  modified_base 14: mod_base = OTHER; note = Nucleotide with phosphorothioate linkage
  modified_base 15: mod_base = OTHER; note = Nucleotide with phosphorothioate linkage
  modified_base 16: mod_base = OTHER; note = 2'-O-methoxyethyl modified nucleotide with phosphorothioate linkage
  modified_base 17: mod_base = OTHER; note = 2'-O-methoxyethyl modified nucleotide with phosphorothioate linkage
  modified_base 18: mod_base = OTHER; note = Locked thymine with phosphorothioate linkage
  modified_base 19: mod_base = OTHER; note = 2'-O-methoxyethyl modified nucleotide with phosphorothioate linkage
  modified_base 20: mod_base = OTHER; note = 2'-O-methoxyethyl 5-methylcytosine
  misc_feature 1..5: note = RNA
  misc_feature 6..15: note = DNA
  misc_feature 16..20: note = RNA
gcagaggtgtagcgaagtgc

SEQ ID NO: 1096 - DNA, 20 bp, synthetic construct
  source 1..20: mol_type = other DNA
  modified_base 1: mod_base = OTHER; note = Locked nucleic acid with phosphorothioate linkage
  modified_base 2: mod_base = OTHER; note = 2'-O-methoxyethyl 5-methylcytosine with phosphorothioate linkage
  modified_base 3: mod_base = OTHER; note = 2'-O-methoxyethyl modified nucleotide with phosphorothioate linkage
  modified_base 4: mod_base = OTHER; note = 2'-O-methoxyethyl modified nucleotide with phosphorothioate linkage
  modified_base 5: mod_base = OTHER; note = 2'-O-methoxyethyl modified nucleotide with phosphorothioate linkage
  modified_base 6: mod_base = OTHER; note = Nucleotide with phosphorothioate linkage
  modified_base 7: mod_base = OTHER; note = Nucleotide with phosphorothioate linkage
  modified_base 8: mod_base = OTHER; note = Thymine with phosphorothioate linkage
  modified_base 9: mod_base = OTHER; note = Nucleotide with phosphorothioate linkage
  modified_base 10: mod_base = OTHER; note = Thymine with phosphorothioate linkage
  modified_base 11: mod_base = OTHER; note = Nucleotide with phosphorothioate linkage
  modified_base 12: mod_base = OTHER; note = Nucleotide with phosphorothioate linkage
  modified_base 13: mod_base = OTHER; note = 5-methylcytosine with phosphorothioate linkage
  modified_base 14: mod_base = OTHER; note = Nucleotide with phosphorothioate linkage
  modified_base 15: mod_base = OTHER; note = Nucleotide with phosphorothioate linkage
  modified_base 16: mod_base = OTHER; note = 2'-O-methoxyethyl modified nucleotide with phosphorothioate linkage
  modified_base 17: mod_base = OTHER; note = 2'-O-methoxyethyl modified nucleotide with phosphorothioate linkage
  modified_base 18: mod_base = OTHER; note = 2'-O-methoxyethyl modified thymine with phosphorothioate linkage
  modified_base 19: mod_base = OTHER; note = Locked nucleic acid with phosphorothioate linkage
  modified_base 20: mod_base = OTHER; note = 2'-O-methoxyethyl 5-methylcytosine
  misc_feature 1..5: note = RNA
  misc_feature 6..15: note = DNA
  misc_feature 16..20: note = RNA
gcagaggtgtagcgaagtgc

SEQ ID NO: 1097 - DNA, 20 bp, synthetic construct
  source 1..20: mol_type = other DNA
  modified_base 1: mod_base = OTHER; note = Locked nucleic acid with phosphorothioate linkage
  modified_base 2: mod_base = OTHER; note = 2'-O-methoxyethyl 5-methylcytosine with phosphorothioate linkage
  modified_base 3: mod_base = OTHER; note = 2'-O-methoxyethyl modified nucleotide with phosphorothioate linkage
  modified_base 4: mod_base = OTHER; note = 2'-O-methoxyethyl modified nucleotide with phosphorothioate linkage
  modified_base 5: mod_base = OTHER; note = 2'-O-methoxyethyl modified nucleotide with phosphorothioate linkage
  modified_base 6: mod_base = OTHER; note = Nucleotide with phosphorothioate linkage
  modified_base 7: mod_base = OTHER; note = Nucleotide with phosphorothioate linkage
  modified_base 8: mod_base = OTHER; note = Thymine with phosphorothioate linkage
  modified_base 9: mod_base = OTHER; note = Nucleotide with phosphorothioate linkage
  modified_base 10: mod_base = OTHER; note = Thymine with phosphorothioate linkage
  modified_base 11: mod_base = OTHER; note = Nucleotide with phosphorothioate linkage
  modified_base 12: mod_base = OTHER; note = Nucleotide with phosphorothioate linkage
  modified_base 13: mod_base = OTHER; note = 5-methylcytosine with phosphorothioate linkage
  modified_base 14: mod_base = OTHER; note = Nucleotide with phosphorothioate linkage
  modified_base 15: mod_base = OTHER; note = Nucleotide with phosphorothioate linkage
  modified_base 16: mod_base = OTHER; note = 2'-O-methoxyethyl modified nucleotide with phosphorothioate linkage
  modified_base 17: mod_base = OTHER; note = 2'-O-methoxyethyl modified nucleotide with phosphorothioate linkage
  modified_base 18: mod_base = OTHER; note = 2'-O-methoxyethyl modified thymine with phosphorothioate linkage
  modified_base 19: mod_base = OTHER; note = 2'-O-methoxyethyl modified nucleotide with phosphorothioate linkage
  modified_base 20: mod_base = OTHER; note = Locked 5-methylcytosine
  misc_feature 1..5: note = RNA
  misc_feature 6..15: note = DNA
  misc_feature 16..20: note = RNA
gcagaggtgtagcgaagtgc

SEQ ID NO: 1098 - DNA, 20 bp, synthetic construct
  source 1..20: mol_type = other DNA
  modified_base 1: mod_base = OTHER; note = 2'-O-methoxyethyl modified nucleotide with phosphorothioate linkage
  modified_base 2: mod_base = OTHER; note = Locked 5-methylcytosine with phosphorothioate linkage
  modified_base 3: mod_base = OTHER; note = Locked nucleic acid with phosphorothioate linkage
  modified_base 4: mod_base = OTHER; note = 2'-O-methoxyethyl modified nucleotide with phosphorothioate linkage
  modified_base 5: mod_base = OTHER; note = 2'-O-methoxyethyl modified nucleotide with phosphorothioate linkage
  modified_base 6: mod_base = OTHER; note = Nucleotide with phosphorothioate linkage
  modified_base 7: mod_base = OTHER; note = Nucleotide with phosphorothioate linkage
  modified_base 8: mod_base = OTHER; note = Thymine with phosphorothioate linkage
  modified_base 9: mod_base = OTHER; note = Nucleotide with phosphorothioate linkage
  modified_base 10: mod_base = OTHER; note = Thymine with phosphorothioate linkage
  modified_base 11: mod_base = OTHER; note = Nucleotide with phosphorothioate linkage
  modified_base 12: mod_base = OTHER; note = Nucleotide with phosphorothioate linkage
  modified_base 13: mod_base = OTHER; note = 5-methylcytosine with phosphorothioate linkage
  modified_base 14: mod_base = OTHER; note = Nucleotide with phosphorothioate linkage
  modified_base 15: mod_base = OTHER; note = Nucleotide with phosphorothioate linkage
  modified_base 16: mod_base = OTHER; note = 2'-O-methoxyethyl modified nucleotide with phosphorothioate linkage
  modified_base 17: mod_base = OTHER; note = 2'-O-methoxyethyl modified nucleotide with phosphorothioate linkage
  modified_base 18: mod_base = OTHER; note = 2'-O-methoxyethyl modified thymine with phosphorothioate linkage
  modified_base 19: mod_base = OTHER; note = 2'-O-methoxyethyl modified nucleotide with phosphorothioate linkage
  modified_base 20: mod_base = OTHER; note = 2'-O-methoxyethyl 5-methylcytosine
  misc_feature 1..5: note = RNA
  misc_feature 6..15: note = DNA
  misc_feature 16..20: note = RNA
gcagaggtgtagcgaagtgc

SEQ ID NO: 1099 - DNA, 20 bp, synthetic construct
  source 1..20: mol_type = other DNA
  modified_base 1: mod_base = OTHER; note = 2'-O-methoxyethyl modified nucleotide with phosphorothioate linkage
  modified_base 2: mod_base = OTHER; note = Locked 5-methylcytosine with phosphorothioate linkage
  modified_base 3: mod_base = OTHER; note = 2'-O-methoxyethyl modified nucleotide with phosphorothioate linkage
  modified_base 4: mod_base = OTHER; note = Locked nucleic acid with phosphorothioate linkage
  modified_base 5: mod_base = OTHER; note = 2'-O-methoxyethyl modified nucleotide with phosphorothioate linkage
  modified_base 6: mod_base = OTHER; note = Nucleotide with phosphorothioate linkage
  modified_base 7: mod_base = OTHER; note = Nucleotide with phosphorothioate linkage
  modified_base 8: mod_base = OTHER; note = Thymine with phosphorothioate linkage
  modified_base 9: mod_base = OTHER; note = Nucleotide with phosphorothioate linkage
  modified_base 10: mod_base = OTHER; note = Thymine with phosphorothioate linkage
  modified_base 11: mod_base = OTHER; note = Nucleotide with phosphorothioate linkage
  modified_base 12: mod_base = OTHER; note = Nucleotide with phosphorothioate linkage
  modified_base 13: mod_base = OTHER; note = 5-methylcytosine with phosphorothioate linkage
  modified_base 14: mod_base = OTHER; note = Nucleotide with phosphorothioate linkage
  modified_base 15: mod_base = OTHER; note = Nucleotide with phosphorothioate linkage
  modified_base 16: mod_base = OTHER; note = 2'-O-methoxyethyl modified nucleotide with phosphorothioate linkage
  modified_base 17: mod_base = OTHER; note = 2'-O-methoxyethyl modified nucleotide with phosphorothioate linkage
  modified_base 18: mod_base = OTHER; note = 2'-O-methoxyethyl modified thymine with phosphorothioate linkage
  modified_base 19: mod_base = OTHER; note = 2'-O-methoxyethyl modified nucleotide with phosphorothioate linkage
  modified_base 20: mod_base = OTHER; note = 2'-O-methoxyethyl 5-methylcytosine
  misc_feature 1..5: note = RNA
  misc_feature 6..15: note = DNA
  misc_feature 16..20: note = RNA
gcagaggtgtagcgaagtgc

SEQ ID NO: 1100 - DNA, 20 bp, synthetic construct
  source 1..20: mol_type = other DNA
  modified_base 1: mod_base = OTHER; note = 2'-O-methoxyethyl modified nucleotide with phosphorothioate linkage
  modified_base 2: mod_base = OTHER; note = Locked 5-methylcytosine with phosphorothioate linkage
  modified_base 3: mod_base = OTHER; note = 2'-O-methoxyethyl modified nucleotide with phosphorothioate linkage
  modified_base 4: mod_base = OTHER; note = 2'-O-methoxyethyl modified nucleotide with phosphorothioate linkage
  modified_base 5: mod_base = OTHER; note = Locked nucleic acid with phosphorothioate linkage
  modified_base 6: mod_base = OTHER; note = Nucleotide with phosphorothioate linkage
  modified_base 7: mod_base = OTHER; note = Nucleotide with phosphorothioate linkage
  modified_base 8: mod_base = OTHER; note = Thymine with phosphorothioate linkage
  modified_base 9: mod_base = OTHER; note = Nucleotide with phosphorothioate linkage
  modified_base 10: mod_base = OTHER; note = Thymine with phosphorothioate linkage
  modified_base 11: mod_base = OTHER; note = Nucleotide with phosphorothioate linkage
  modified_base 12: mod_base = OTHER; note = Nucleotide with phosphorothioate linkage
  modified_base 13: mod_base = OTHER; note = 5-methylcytosine with phosphorothioate linkage
  modified_base 14: mod_base = OTHER; note = Nucleotide with phosphorothioate linkage
  modified_base 15: mod_base = OTHER; note = Nucleotide with phosphorothioate linkage
  modified_base 16: mod_base = OTHER; note = 2'-O-methoxyethyl modified nucleotide with phosphorothioate linkage
  modified_base 17: mod_base = OTHER; note = 2'-O-methoxyethyl modified nucleotide with phosphorothioate linkage
  modified_base 18: mod_base = OTHER; note = 2'-O-methoxyethyl modified thymine with phosphorothioate linkage
  modified_base 19: mod_base = OTHER; note = 2'-O-methoxyethyl modified nucleotide with phosphorothioate linkage
  modified_base 20: mod_base = OTHER; note = 2'-O-methoxyethyl 5-methylcytosine
  misc_feature 1..5: note = RNA
  misc_feature 6..15: note = DNA
  misc_feature 16..20: note = RNA
gcagaggtgtagcgaagtgc

SEQ ID NO: 1101 - DNA, 20 bp, synthetic construct
  source 1..20: mol_type = other DNA
  modified_base 1: mod_base = OTHER; note = 2'-O-methoxyethyl modified nucleotide with phosphorothioate linkage
  modified_base 2: mod_base = OTHER; note = Locked 5-methylcytosine with phosphorothioate linkage
  modified_base 3: mod_base = OTHER; note = 2'-O-methoxyethyl modified nucleotide with phosphorothioate linkage
  modified_base 4: mod_base = OTHER; note = 2'-O-methoxyethyl modified nucleotide with phosphorothioate linkage
  modified_base 5: mod_base = OTHER; note = 2'-O-methoxyethyl modified nucleotide with phosphorothioate linkage
  modified_base 6: mod_base = OTHER; note = Nucleotide with phosphorothioate linkage
  modified_base 7: mod_base = OTHER; note = Nucleotide with phosphorothioate linkage
  modified_base 8: mod_base = OTHER; note = Thymine with phosphorothioate linkage
  modified_base 9: mod_base = OTHER; note = Nucleotide with phosphorothioate linkage
  modified_base 10: mod_base = OTHER; note = Thymine with phosphorothioate linkage
  modified_base 11: mod_base = OTHER; note = Nucleotide with phosphorothioate linkage
  modified_base 12: mod_base = OTHER; note = Nucleotide with phosphorothioate linkage
  modified_base 13: mod_base = OTHER; note = 5-methylcytosine with phosphorothioate linkage
  modified_base 14: mod_base = OTHER; note = Nucleotide with phosphorothioate linkage
  modified_base 15: mod_base = OTHER; note = Nucleotide with phosphorothioate linkage
  modified_base 16: mod_base = OTHER; note = Locked nucleic acid with phosphorothioate linkage
  modified_base 17: mod_base = OTHER; note = 2'-O-methoxyethyl modified nucleotide with phosphorothioate linkage
  modified_base 18: mod_base = OTHER; note = 2'-O-methoxyethyl modified thymine with phosphorothioate linkage
  modified_base 19: mod_base = OTHER; note = 2'-O-methoxyethyl modified nucleotide with phosphorothioate linkage
  modified_base 20: mod_base = OTHER; note = 2'-O-methoxyethyl 5-methylcytosine
  misc_feature 1..5: note = RNA
  misc_feature 6..15: note = DNA
  misc_feature 16..20: note = RNA
gcagaggtgtagcgaagtgc

SEQ ID NO: 1102 - DNA, 20 bp, synthetic construct
  source 1..20: mol_type = other DNA
  modified_base 1: mod_base = OTHER; note = 2'-O-methoxyethyl modified nucleotide with phosphorothioate linkage
  modified_base 2: mod_base = OTHER; note = Locked 5-methylcytosine with phosphorothioate linkage
  modified_base 3: mod_base = OTHER; note = 2'-O-methoxyethyl modified nucleotide with phosphorothioate linkage
  modified_base 4: mod_base = OTHER; note = 2'-O-methoxyethyl modified nucleotide with phosphorothioate linkage
  modified_base 5: mod_base = OTHER; note = 2'-O-methoxyethyl modified nucleotide with phosphorothioate linkage
  modified_base 6: mod_base = OTHER; note = Nucleotide with phosphorothioate linkage
  modified_base 7: mod_base = OTHER; note = Nucleotide with phosphorothioate linkage
  modified_base 8: mod_base = OTHER; note = Thymine with phosphorothioate linkage
  modified_base 9: mod_base = OTHER; note = Nucleotide with phosphorothioate linkage
  modified_base 10: mod_base = OTHER; note = Thymine with phosphorothioate linkage
  modified_base 11: mod_base = OTHER; note = Nucleotide with phosphorothioate linkage
  modified_base 12: mod_base = OTHER; note = Nucleotide with phosphorothioate linkage
  modified_base 13: mod_base = OTHER; note = 5-methylcytosine with phosphorothioate linkage
  modified_base 14: mod_base = OTHER; note = Nucleotide with phosphorothioate linkage
  modified_base 15: mod_base = OTHER; note = Nucleotide with phosphorothioate linkage
  modified_base 16: mod_base = OTHER; note = 2'-O-methoxyethyl modified nucleotide with phosphorothioate linkage
  modified_base 17: mod_base = OTHER; note = Locked nucleic acid with phosphorothioate linkage
  modified_base 18: mod_base = OTHER; note = 2'-O-methoxyethyl modified thymine with phosphorothioate linkage
  modified_base 19: mod_base = OTHER; note = 2'-O-methoxyethyl modified nucleotide with phosphorothioate linkage
  modified_base 20: mod_base = OTHER; note = 2'-O-methoxyethyl 5-methylcytosine
  misc_feature 1..5: note = RNA
  misc_feature 6..15: note = DNA
  misc_feature 16..20: note = RNA
gcagaggtgtagcgaagtgc

SEQ ID NO: 1103 - DNA, 20 bp, synthetic construct
  source 1..20: mol_type = other DNA
  modified_base 1: mod_base = OTHER; note = 2'-O-methoxyethyl modified nucleotide with phosphorothioate linkage
  modified_base 2: mod_base = OTHER; note = Locked 5-methylcytosine with phosphorothioate linkage
  modified_base 3: mod_base = OTHER; note = 2'-O-methoxyethyl modified nucleotide with phosphorothioate linkage
  modified_base 4: mod_base = OTHER; note = 2'-O-methoxyethyl modified nucleotide with phosphorothioate linkage
  modified_base 5: mod_base = OTHER; note = 2'-O-methoxyethyl modified nucleotide with phosphorothioate linkage
  modified_base 6: mod_base = OTHER; note = Nucleotide with phosphorothioate linkage
  modified_base 7: mod_base = OTHER; note = Nucleotide with phosphorothioate linkage
  modified_base 8: mod_base = OTHER; note = Thymine with phosphorothioate linkage
  modified_base 9: mod_base = OTHER; note = Nucleotide with phosphorothioate linkage
  modified_base 10: mod_base = OTHER; note = Thymine with phosphorothioate linkage
  modified_base 11: mod_base = OTHER; note = Nucleotide with phosphorothioate linkage
  modified_base 12: mod_base = OTHER; note = Nucleotide with phosphorothioate linkage
  modified_base 13: mod_base = OTHER; note = 5-methylcytosine with phosphorothioate linkage
  modified_base 14: mod_base = OTHER; note = Nucleotide with phosphorothioate linkage
  modified_base 15: mod_base = OTHER; note = Nucleotide with phosphorothioate linkage
  modified_base 16: mod_base = OTHER; note = 2'-O-methoxyethyl modified nucleotide with phosphorothioate linkage
  modified_base 17: mod_base = OTHER; note = 2'-O-methoxyethyl modified nucleotide with phosphorothioate linkage
  modified_base 18: mod_base = OTHER; note = Locked thymine with phosphorothioate linkage
  modified_base 19: mod_base = OTHER; note = 2'-O-methoxyethyl modified nucleotide with phosphorothioate linkage
  modified_base 20: mod_base = OTHER; note = 2'-O-methoxyethyl 5-methylcytosine
  misc_feature 1..5: note = RNA
  misc_feature 6..15: note = DNA
  misc_feature 16..20: note = RNA
gcagaggtgtagcgaagtgc

SEQ ID NO: 1104 - DNA, 20 bp, synthetic construct
  source 1..20: mol_type = other DNA
  modified_base 1: mod_base = OTHER; note = 2'-O-methoxyethyl modified nucleotide with phosphorothioate linkage
  modified_base 2: mod_base = OTHER; note = Locked 5-methylcytosine with phosphorothioate linkage
  modified_base 3: mod_base = OTHER; note = 2'-O-methoxyethyl modified nucleotide with phosphorothioate linkage
  modified_base 4: mod_base = OTHER; note = 2'-O-methoxyethyl modified nucleotide with phosphorothioate linkage
  modified_base 5: mod_base = OTHER; note = 2'-O-methoxyethyl modified nucleotide with phosphorothioate linkage
  modified_base 6: mod_base = OTHER; note = Nucleotide with phosphorothioate linkage
  modified_base 7: mod_base = OTHER; note = Nucleotide with phosphorothioate linkage
  modified_base 8: mod_base = OTHER; note = Thymine with phosphorothioate linkage
  modified_base 9: mod_base = OTHER; note = Nucleotide with phosphorothioate linkage
  modified_base 10: mod_base = OTHER; note = Thymine with phosphorothioate linkage
  modified_base 11: mod_base = OTHER; note = Nucleotide with phosphorothioate linkage
  modified_base 12: mod_base = OTHER; note = Nucleotide with phosphorothioate linkage
  modified_base 13: mod_base = OTHER; note = 5-methylcytosine with phosphorothioate linkage
  modified_base 14: mod_base = OTHER; note = Nucleotide with phosphorothioate linkage
  modified_base 15: mod_base = OTHER; note = Nucleotide with phosphorothioate linkage
  modified_base 16: mod_base = OTHER; note = 2'-O-methoxyethyl modified nucleotide with phosphorothioate linkage
  modified_base 17: mod_base = OTHER; note = 2'-O-methoxyethyl modified nucleotide with phosphorothioate linkage
  modified_base 18: mod_base = OTHER; note = 2'-O-methoxyethyl modified thymine with phosphorothioate linkage
  modified_base 19: mod_base = OTHER; note = Locked nucleic acid with phosphorothioate linkage
  modified_base 20: mod_base = OTHER; note = 2'-O-methoxyethyl 5-methylcytosine
  misc_feature 1..5: note = RNA
  misc_feature 6..15: note = DNA
  misc_feature 16..20: note = RNA
gcagaggtgtagcgaagtgc

SEQ ID NO: 1105 - DNA, 20 bp, synthetic construct
  source 1..20: mol_type = other DNA
  modified_base 1: mod_base = OTHER; note = 2'-O-methoxyethyl modified nucleotide with phosphorothioate linkage
  modified_base 2: mod_base = OTHER; note = Locked 5-methylcytosine with phosphorothioate linkage
  modified_base 3: mod_base = OTHER; note = 2'-O-methoxyethyl modified nucleotide with phosphorothioate linkage
  modified_base 4: mod_base = OTHER; note = 2'-O-methoxyethyl modified nucleotide with phosphorothioate linkage
  modified_base 5: mod_base = OTHER; note = 2'-O-methoxyethyl modified nucleotide with phosphorothioate linkage
  modified_base 6: mod_base = OTHER; note = Nucleotide with phosphorothioate linkage
  modified_base 7: mod_base = OTHER; note = Nucleotide with phosphorothioate linkage
  modified_base 8: mod_base = OTHER; note = Thymine with phosphorothioate linkage
  modified_base 9: mod_base = OTHER; note = Nucleotide with phosphorothioate linkage
  modified_base 10: mod_base = OTHER; note = Thymine with phosphorothioate linkage
  modified_base 11: mod_base = OTHER; note = Nucleotide with phosphorothioate linkage
  modified_base 12: mod_base = OTHER; note = Nucleotide with phosphorothioate linkage
  modified_base 13: mod_base = OTHER; note = 5-methylcytosine with phosphorothioate linkage
  modified_base 14: mod_base = OTHER; note = Nucleotide with phosphorothioate linkage
  modified_base 15: mod_base = OTHER; note = Nucleotide with phosphorothioate linkage
  modified_base 16: mod_base = OTHER; note = 2'-O-methoxyethyl modified nucleotide with phosphorothioate linkage
  modified_base 17: mod_base = OTHER; note = 2'-O-methoxyethyl modified nucleotide with phosphorothioate linkage
  modified_base 18: mod_base = OTHER; note = 2'-O-methoxyethyl modified thymine with phosphorothioate linkage
  modified_base 19: mod_base = OTHER; note = 2'-O-methoxyethyl modified nucleotide with phosphorothioate linkage
  modified_base 20: mod_base = OTHER; note = Locked 5-methylcytosine
  misc_feature 1..5: note = RNA
  misc_feature 6..15: note = DNA
  misc_feature 16..20: note = RNA
gcagaggtgtagcgaagtgc

SEQ ID NO: 1106 - DNA, 20 bp, synthetic construct
  source 1..20: mol_type = other DNA
  modified_base 1: mod_base = OTHER; note = 2'-O-methoxyethyl modified nucleotide with phosphorothioate linkage
  modified_base 2: mod_base = OTHER; note = 2'-O-methoxyethyl 5-methylcytosine with phosphorothioate linkage
  modified_base 3: mod_base = OTHER; note = Locked nucleic acid with phosphorothioate linkage
  modified_base 4: mod_base = OTHER; note = Locked nucleic acid with phosphorothioate linkage
  modified_base 5: mod_base = OTHER; note = 2'-O-methoxyethyl modified nucleotide with phosphorothioate linkage
  modified_base 6: mod_base = OTHER; note = Nucleotide with phosphorothioate linkage
  modified_base 7: mod_base = OTHER; note = Nucleotide with phosphorothioate linkage
  modified_base 8: mod_base = OTHER; note = Thymine with phosphorothioate linkage
  modified_base 9: mod_base = OTHER; note = Nucleotide with phosphorothioate linkage
  modified_base 10: mod_base = OTHER; note = Thymine with phosphorothioate linkage
  modified_base 11: mod_base = OTHER; note = Nucleotide with phosphorothioate linkage
  modified_base 12: mod_base = OTHER; note = Nucleotide with phosphorothioate linkage
  modified_base 13: mod_base = OTHER; note = 5-methylcytosine with phosphorothioate linkage
  modified_base 14: mod_base = OTHER; note = Nucleotide with phosphorothioate linkage
  modified_base 15: mod_base = OTHER; note = Nucleotide with phosphorothioate linkage
  modified_base 16: mod_base = OTHER; note = 2'-O-methoxyethyl modified nucleotide with phosphorothioate linkage
  modified_base 17: mod_base = OTHER; note = 2'-O-methoxyethyl modified nucleotide with phosphorothioate linkage
  modified_base 18: mod_base = OTHER; note = 2'-O-methoxyethyl modified thymine with phosphorothioate linkage
  modified_base 19: mod_base = OTHER; note = 2'-O-methoxyethyl modified nucleotide with phosphorothioate linkage
  modified_base 20: mod_base = OTHER; note = 2'-O-methoxyethyl 5-methylcytosine
  misc_feature 1..5: note = RNA
  misc_feature 6..15: note = DNA
  misc_feature 16..20: note = RNA
gcagaggtgtagcgaagtgc

SEQ ID NO: 1107 - DNA, 20 bp, synthetic construct
  source 1..20: mol_type = other DNA
  modified_base 1: mod_base = OTHER; note = 2'-O-methoxyethyl modified nucleotide with phosphorothioate linkage
  modified_base 2: mod_base = OTHER; note = 2'-O-methoxyethyl 5-methylcytosine with phosphorothioate linkage
  modified_base 3: mod_base = OTHER; note = Locked nucleic acid with phosphorothioate linkage
  modified_base 4: mod_base = OTHER; note = 2'-O-methoxyethyl modified nucleotide with phosphorothioate linkage
  modified_base 5: mod_base = OTHER; note = Locked nucleic acid with phosphorothioate linkage
  modified_base 6: mod_base = OTHER; note = Nucleotide with phosphorothioate linkage
  modified_base 7: mod_base = OTHER; note = Nucleotide with phosphorothioate linkage
  modified_base 8: mod_base = OTHER; note = Thymine with phosphorothioate linkage
  modified_base 9: mod_base = OTHER; note = Nucleotide with phosphorothioate linkage
  modified_base 10: mod_base = OTHER; note = Thymine with phosphorothioate linkage
  modified_base 11: mod_base = OTHER; note = Nucleotide with phosphorothioate linkage
  modified_base 12: mod_base = OTHER; note = Nucleotide with phosphorothioate linkage
  modified_base 13: mod_base = OTHER; note = 5-methylcytosine with phosphorothioate linkage
  modified_base 14: mod_base = OTHER; note = Nucleotide with phosphorothioate linkage
  modified_base 15: mod_base = OTHER; note = Nucleotide with phosphorothioate linkage
  modified_base 16: mod_base = OTHER; note = 2'-O-methoxyethyl modified nucleotide with phosphorothioate linkage
  modified_base 17: mod_base = OTHER; note = 2'-O-methoxyethyl modified nucleotide with phosphorothioate linkage
  modified_base 18: mod_base = OTHER; note = 2'-O-methoxyethyl modified thymine with phosphorothioate linkage
  modified_base 19: mod_base = OTHER; note = 2'-O-methoxyethyl modified nucleotide with phosphorothioate linkage
  modified_base 20: mod_base = OTHER; note = 2'-O-methoxyethyl 5-methylcytosine
  misc_feature 1..5: note = RNA
  misc_feature 6..15: note = DNA
  misc_feature 16..20: note = RNA
gcagaggtgtagcgaagtgc

SEQ ID NO: 1108 - DNA, 20 bp, synthetic construct
  source 1..20: mol_type = other DNA
  modified_base 1: mod_base = OTHER; note = 2'-O-methoxyethyl modified nucleotide with phosphorothioate linkage
  modified_base 2: mod_base = OTHER; note = 2'-O-methoxyethyl 5-methylcytosine with phosphorothioate linkage
  modified_base 3: mod_base = OTHER; note = Locked nucleic acid with phosphorothioate linkage
  modified_base 4: mod_base = OTHER; note = 2'-O-methoxyethyl modified nucleotide with phosphorothioate linkage
  modified_base 5: mod_base = OTHER; note = 2'-O-methoxyethyl modified nucleotide with phosphorothioate linkage
  modified_base 6: mod_base = OTHER; note = Nucleotide with phosphorothioate linkage
  modified_base 7: mod_base = OTHER; note = Nucleotide with phosphorothioate linkage
  modified_base 8: mod_base = OTHER; note = Thymine with phosphorothioate linkage
  modified_base 9: mod_base = OTHER; note = Nucleotide with phosphorothioate linkage
  modified_base 10: mod_base = OTHER; note = Thymine with phosphorothioate linkage
  modified_base 11: mod_base = OTHER; note = Nucleotide with phosphorothioate linkage
  modified_base 12: mod_base = OTHER; note = Nucleotide with phosphorothioate linkage
  modified_base 13: mod_base = OTHER; note = 5-methylcytosine with phosphorothioate linkage
  modified_base 14: mod_base = OTHER; note = Nucleotide with phosphorothioate linkage
  modified_base 15: mod_base = OTHER; note = Nucleotide with phosphorothioate linkage
  modified_base 16: mod_base = OTHER; note = Locked nucleic acid with phosphorothioate linkage
  modified_base 17: mod_base = OTHER; note = 2'-O-methoxyethyl modified nucleotide with phosphorothioate linkage
  modified_base 18: mod_base = OTHER; note = 2'-O-methoxyethyl modified thymine with phosphorothioate linkage
  modified_base 19: mod_base = OTHER; note = 2'-O-methoxyethyl modified nucleotide with phosphorothioate linkage
  modified_base 20: mod_base = OTHER; note = 2'-O-methoxyethyl 5-methylcytosine
  misc_feature 1..5: note = RNA
  misc_feature 6..15: note = DNA
  misc_feature 16..20: note = RNA
gcagaggtgtagcgaagtgc

SEQ ID NO: 1109 - DNA, 20 bp, synthetic construct
  source 1..20: mol_type = other DNA
  modified_base 1: mod_base = OTHER; note = 2'-O-methoxyethyl modified nucleotide with phosphorothioate linkage
  modified_base 2: mod_base = OTHER; note = 2'-O-methoxyethyl 5-methylcytosine with phosphorothioate linkage
  modified_base 3: mod_base = OTHER; note = Locked nucleic acid with phosphorothioate linkage
  modified_base 4: mod_base = OTHER; note = 2'-O-methoxyethyl modified nucleotide with phosphorothioate linkage
  modified_base 5: mod_base = OTHER; note = 2'-O-methoxyethyl modified nucleotide with phosphorothioate linkage
  modified_base 6: mod_base = OTHER; note = Nucleotide with phosphorothioate linkage
  modified_base 7: mod_base = OTHER; note = Nucleotide with phosphorothioate linkage
  modified_base 8: mod_base = OTHER; note = Thymine with phosphorothioate linkage
  modified_base 9: mod_base = OTHER; note = Nucleotide with phosphorothioate linkage
  modified_base 10: mod_base = OTHER; note = Thymine with phosphorothioate linkage
  modified_base 11: mod_base = OTHER; note = Nucleotide with phosphorothioate linkage
  modified_base 12: mod_base = OTHER; note = Nucleotide with phosphorothioate linkage
  modified_base 13: mod_base = OTHER; note = 5-methylcytosine with phosphorothioate linkage
  modified_base 14: mod_base = OTHER; note = Nucleotide with phosphorothioate linkage
  modified_base 15: mod_base = OTHER; note = Nucleotide with phosphorothioate linkage
  modified_base 16: mod_base = OTHER; note = 2'-O-methoxyethyl modified nucleotide with phosphorothioate linkage
  modified_base 17: mod_base = OTHER; note = Locked nucleic acid with phosphorothioate linkage
  modified_base 18: mod_base = OTHER; note = 2'-O-methoxyethyl modified thymine with phosphorothioate linkage
  modified_base 19: mod_base = OTHER; note = 2'-O-methoxyethyl modified nucleotide with phosphorothioate linkage
  modified_base 20: mod_base = OTHER; note = 2'-O-methoxyethyl 5-methylcytosine
  misc_feature 1..5: note = RNA
  misc_feature 6..15: note = DNA
  misc_feature 16..20: note = RNA
gcagaggtgtagcgaagtgc

SEQ ID NO: 1110 - DNA, 20 bp, synthetic construct
  source 1..20: mol_type = other DNA
  modified_base 1: mod_base = OTHER; note = 2'-O-methoxyethyl modified nucleotide with phosphorothioate linkage
  modified_base 2: mod_base = OTHER; note = 2'-O-methoxyethyl 5-methylcytosine with phosphorothioate linkage
  modified_base 3: mod_base = OTHER; note = Locked nucleic acid with phosphorothioate linkage
  modified_base 4: mod_base = OTHER; note = 2'-O-methoxyethyl modified nucleotide with phosphorothioate linkage
  modified_base 5: mod_base = OTHER; note = 2'-O-methoxyethyl modified nucleotide with phosphorothioate linkage
  modified_base 6: mod_base = OTHER; note = Nucleotide with phosphorothioate linkage
  modified_base 7: mod_base = OTHER; note = Nucleotide with phosphorothioate linkage
  modified_base 8: mod_base = OTHER; note = Thymine with phosphorothioate linkage
  modified_base 9: mod_base = OTHER; note = Nucleotide with phosphorothioate linkage
  modified_base 10: mod_base = OTHER; note = Thymine with phosphorothioate linkage
  modified_base 11: mod_base = OTHER; note = Nucleotide with phosphorothioate linkage
  modified_base 12: mod_base = OTHER; note = Nucleotide with phosphorothioate linkage
  modified_base 13: mod_base = OTHER; note = 5-methylcytosine with phosphorothioate linkage
  modified_base 14: mod_base = OTHER; note = Nucleotide with phosphorothioate linkage
  modified_base 15: mod_base = OTHER; note = Nucleotide with phosphorothioate linkage
  modified_base 16: mod_base = OTHER; note = 2'-O-methoxyethyl modified nucleotide with phosphorothioate linkage
  modified_base 17: mod_base = OTHER; note = 2'-O-methoxyethyl modified nucleotide with phosphorothioate linkage
  modified_base 18: mod_base = OTHER; note = Locked thymine with phosphorothioate linkage
  modified_base 19: mod_base = OTHER; note = 2'-O-methoxyethyl modified nucleotide with phosphorothioate linkage
  modified_base 20: mod_base = OTHER; note = 2'-O-methoxyethyl 5-methylcytosine
  misc_feature 1..5: note = RNA
  misc_feature 6..15: note = DNA
  misc_feature 16..20: note = RNA
gcagaggtgtagcgaagtgc

SEQ ID NO: 1111 - DNA, 20 bp, synthetic construct
  source 1..20: mol_type = other DNA
  modified_base 1: mod_base = OTHER; note = 2'-O-methoxyethyl modified nucleotide with phosphorothioate linkage
  modified_base 2: mod_base = OTHER; note = 2'-O-methoxyethyl 5-methylcytosine with phosphorothioate linkage
  modified_base 3: mod_base = OTHER; note = Locked nucleic acid with phosphorothioate linkage
  modified_base 4: mod_base = OTHER; note = 2'-O-methoxyethyl modified nucleotide with phosphorothioate linkage
  modified_base 5: mod_base = OTHER; note = 2'-O-methoxyethyl modified nucleotide with phosphorothioate linkage
  modified_base 6: mod_base = OTHER; note = Nucleotide with phosphorothioate linkage
  modified_base 7: mod_base = OTHER; note = Nucleotide with phosphorothioate linkage
  modified_base 8: mod_base = OTHER; note = Thymine with phosphorothioate linkage
  modified_base 9: mod_base = OTHER; note = Nucleotide with phosphorothioate linkage
  modified_base 10: mod_base = OTHER; note = Thymine with phosphorothioate linkage
  modified_base 11: mod_base = OTHER; note = Nucleotide with phosphorothioate linkage
  modified_base 12: mod_base = OTHER; note = Nucleotide with phosphorothioate linkage
  modified_base 13: mod_base = OTHER; note = 5-methylcytosine with phosphorothioate linkage
  modified_base 14: mod_base = OTHER; note = Nucleotide with phosphorothioate linkage
  modified_base 15: mod_base = OTHER; note = Nucleotide with phosphorothioate linkage
  modified_base 16: mod_base = OTHER; note = 2'-O-methoxyethyl modified nucleotide with phosphorothioate linkage
  modified_base 17: mod_base = OTHER; note = 2'-O-methoxyethyl modified nucleotide with phosphorothioate linkage
  modified_base 18: mod_base = OTHER; note = 2'-O-methoxyethyl modified thymine with phosphorothioate linkage
  modified_base 19: mod_base = OTHER; note = Locked nucleic acid with phosphorothioate linkage
  modified_base 20: mod_base = OTHER; note = 2'-O-methoxyethyl 5-methylcytosine
  misc_feature 1..5: note = RNA
  misc_feature 6..15: note = DNA
  misc_feature 16..20: note = RNA
gcagaggtgtagcgaagtgc

SEQ ID NO: 1112 - DNA, 20 bp, synthetic construct
  source 1..20: mol_type = other DNA
  modified_base 1: mod_base = OTHER; note = 2'-O-methoxyethyl modified nucleotide with phosphorothioate linkage
  modified_base 2: mod_base = OTHER; note = 2'-O-methoxyethyl 5-methylcytosine with phosphorothioate linkage
  modified_base 3: mod_base = OTHER; note = Locked nucleic acid with phosphorothioate linkage
  modified_base 4: mod_base = OTHER; note = 2'-O-methoxyethyl modified nucleotide with phosphorothioate linkage
  modified_base 5: mod_base = OTHER; note = 2'-O-methoxyethyl modified nucleotide with phosphorothioate linkage
  modified_base 6: mod_base = OTHER; note = Nucleotide with phosphorothioate linkage
  modified_base 7: mod_base = OTHER; note = Nucleotide with phosphorothioate linkage
  modified_base 8: mod_base = OTHER; note = Thymine with phosphorothioate linkage
  modified_base 9: mod_base = OTHER; note = Nucleotide with phosphorothioate linkage
  modified_base 10: mod_base = OTHER; note = Thymine with phosphorothioate linkage
  modified_base 11: mod_base = OTHER; note = Nucleotide with phosphorothioate linkage
  modified_base 12: mod_base = OTHER; note = Nucleotide with phosphorothioate linkage
  modified_base 13: mod_base = OTHER; note = 5-methylcytosine with phosphorothioate linkage
  modified_base 14: mod_base = OTHER; note = Nucleotide with phosphorothioate linkage
  modified_base 15: mod_base = OTHER; note = Nucleotide with phosphorothioate linkage
  modified_base 16: mod_base = OTHER; note = 2'-O-methoxyethyl modified nucleotide with phosphorothioate linkage
  modified_base 17: mod_base = OTHER; note = 2'-O-methoxyethyl modified nucleotide with phosphorothioate linkage
  modified_base 18: mod_base = OTHER; note = 2'-O-methoxyethyl modified thymine with phosphorothioate linkage
  modified_base 19: mod_base = OTHER; note = 2'-O-methoxyethyl modified nucleotide with phosphorothioate linkage
  modified_base 20: mod_base = OTHER; note = Locked 5-methylcytosine
  misc_feature 1..5: note = RNA
  misc_feature 6..15: note = DNA
  misc_feature 16..20: note = RNA
gcagaggtgtagcgaagtgc

SEQ ID NO: 1113 - DNA, 20 bp, synthetic construct
  source 1..20: mol_type = other DNA
  modified_base 1: mod_base = OTHER; note = 2'-O-methoxyethyl modified nucleotide with phosphorothioate linkage
  modified_base 2: mod_base = OTHER; note = 2'-O-methoxyethyl 5-methylcytosine with phosphorothioate linkage
  modified_base 3: mod_base = OTHER; note = 2'-O-methoxyethyl modified nucleotide with phosphorothioate linkage
  modified_base 4: mod_base = OTHER; note = 2'-O-methoxyethyl modified nucleotide with phosphorothioate linkage
  modified_base 5: mod_base = OTHER; note = Locked nucleic acid with phosphorothioate linkage
  modified_base 6: mod_base = OTHER; note = Nucleotide with phosphorothioate linkage
  modified_base 7: mod_base = OTHER; note = Nucleotide with phosphorothioate linkage
  modified_base 8: mod_base = OTHER; note = Thymine with phosphorothioate linkage
  modified_base 9: mod_base = OTHER; note = Nucleotide with phosphorothioate linkage
  modified_base 10: mod_base = OTHER; note = Thymine with phosphorothioate linkage
  modified_base 11: mod_base = OTHER; note = Nucleotide with phosphorothioate linkage
  modified_base 12: mod_base = OTHER; note = Nucleotide with phosphorothioate linkage
  modified_base 13: mod_base = OTHER; note = 5-methylcytosine with phosphorothioate linkage
  modified_base 14: mod_base = OTHER; note = Nucleotide with phosphorothioate linkage
  modified_base 15: mod_base = OTHER; note = Nucleotide with phosphorothioate linkage
  modified_base 16: mod_base = OTHER; note = 2'-O-methoxyethyl modified nucleotide with phosphorothioate linkage
  modified_base 17: mod_base = OTHER; note = 2'-O-methoxyethyl modified nucleotide with phosphorothioate linkage
  modified_base 18: mod_base = OTHER; note = 2'-O-methoxyethyl modified thymine with phosphorothioate linkage
  modified_base 19: mod_base = OTHER; note = Locked nucleic acid with phosphorothioate linkage
  modified_base 20: mod_base = OTHER; note = 2'-O-methoxyethyl 5-methylcytosine
  misc_feature 1..5: note = RNA
  misc_feature 6..15: note = DNA
  misc_feature 16..20: note = RNA
gcagaggtgtagcgaagtgc

SEQ ID NO: 1114 - DNA, 20 bp, synthetic construct
  source 1..20: mol_type = other DNA
  modified_base 1: mod_base = OTHER; note = 2'-O-methoxyethyl modified nucleotide with phosphorothioate linkage
  modified_base 2: mod_base = OTHER; note = 2'-O-methoxyethyl 5-methylcytosine with phosphorothioate linkage
  modified_base 3: mod_base = OTHER; note = 2'-O-methoxyethyl modified nucleotide with phosphorothioate linkage
  modified_base 4: mod_base = OTHER; note = 2'-O-methoxyethyl modified nucleotide with phosphorothioate linkage
  modified_base 5: mod_base = OTHER; note = Locked nucleic acid with phosphorothioate linkage
  modified_base 6: mod_base = OTHER; note = Nucleotide with phosphorothioate linkage
  modified_base 7: mod_base = OTHER; note = Nucleotide with phosphorothioate linkage
  modified_base 8: mod_base = OTHER; note = Thymine with phosphorothioate linkage
  modified_base 9: mod_base = OTHER; note = Nucleotide with phosphorothioate linkage
  modified_base 10: mod_base = OTHER; note = Thymine with phosphorothioate linkage
  modified_base 11: mod_base = OTHER; note = Nucleotide with phosphorothioate linkage
  modified_base 12: mod_base = OTHER; note = Nucleotide with phosphorothioate linkage
  modified_base 13: mod_base = OTHER; note = 5-methylcytosine with phosphorothioate linkage
  modified_base 14: mod_base = OTHER; note = Nucleotide with phosphorothioate linkage
  modified_base 15: mod_base = OTHER; note = Nucleotide with phosphorothioate linkage
  modified_base 16: mod_base = OTHER; note = 2'-O-methoxyethyl modified nucleotide with phosphorothioate linkage
  modified_base 17: mod_base = OTHER; note = 2'-O-methoxyethyl modified nucleotide with phosphorothioate linkage
  modified_base 18: mod_base = OTHER; note = Locked thymine with phosphorothioate linkage
  modified_base 19: mod_base = OTHER; note = 2'-O-methoxyethyl modified nucleotide with phosphorothioate linkage
  modified_base 20: mod_base = OTHER; note = 2'-O-methoxyethyl 5-methylcytosine
  misc_feature 1..5: note = RNA
  misc_feature 6..15: note = DNA
  misc_feature 16..20: note = RNA
gcagaggtgtagcgaagtgc

SEQ ID NO: 1115 - DNA, 20 bp, synthetic construct
  source 1..20: mol_type = other DNA
  modified_base 1: mod_base = OTHER; note = 2'-O-methoxyethyl modified nucleotide with phosphorothioate linkage
  modified_base 2: mod_base = OTHER; note = 2'-O-methoxyethyl 5-methylcytosine with phosphorothioate linkage
  modified_base 3: mod_base = OTHER; note = 2'-O-methoxyethyl modified nucleotide with phosphorothioate linkage
  modified_base 4: mod_base = OTHER; note = 2'-O-methoxyethyl modified nucleotide with phosphorothioate linkage
  modified_base 5: mod_base = OTHER; note = Locked nucleic acid with phosphorothioate linkage
  modified_base 6: mod_base = OTHER; note = Nucleotide with phosphorothioate linkage
  modified_base 7: mod_base = OTHER; note = Nucleotide with phosphorothioate linkage
  modified_base 8: mod_base = OTHER; note = Thymine with phosphorothioate linkage
  modified_base 9: mod_base = OTHER; note = Nucleotide with phosphorothioate linkage
  modified_base 10: mod_base = OTHER; note = Thymine with phosphorothioate linkage
  modified_base 11: mod_base = OTHER; note = Nucleotide with phosphorothioate linkage
  modified_base 12: mod_base = OTHER; note = Nucleotide with phosphorothioate linkage
  modified_base 13: mod_base = OTHER; note = 5-methylcytosine with phosphorothioate linkage
  modified_base 14: mod_base = OTHER; note = Nucleotide with phosphorothioate linkage
  modified_base 15: mod_base = OTHER; note = Nucleotide with phosphorothioate linkage
  modified_base 16: mod_base = OTHER; note = 2'-O-methoxyethyl modified nucleotide with phosphorothioate linkage
  modified_base 17: mod_base = OTHER; note = Locked nucleic acid with phosphorothioate linkage
  modified_base 18: mod_base = OTHER; note = 2'-O-methoxyethyl modified thymine with phosphorothioate linkage
  modified_base 19: mod_base = OTHER; note = 2'-O-methoxyethyl modified nucleotide with phosphorothioate linkage
  modified_base 20: mod_base = OTHER; note = 2'-O-methoxyethyl 5-methylcytosine
  misc_feature 1..5: note = RNA
  misc_feature 6..15: note = DNA
  misc_feature 16..20: note = RNA
gcagaggtgtagcgaagtgc

SEQ ID NO: 1116 - DNA, 20 bp, synthetic construct
  source 1..20: mol_type = other DNA
  modified_base 1: mod_base = OTHER; note = 2'-O-methoxyethyl modified nucleotide with phosphorothioate linkage
  modified_base 2: mod_base = OTHER; note = 2'-O-methoxyethyl 5-methylcytosine with phosphorothioate linkage
  modified_base 3: mod_base = OTHER; note = 2'-O-methoxyethyl modified nucleotide with phosphorothioate linkage
  modified_base 4: mod_base = OTHER; note = 2'-O-methoxyethyl modified nucleotide with phosphorothioate linkage
  modified_base 5: mod_base = OTHER; note = Locked nucleic acid with phosphorothioate linkage
  modified_base 6: mod_base = OTHER; note = Nucleotide with phosphorothioate linkage
  modified_base 7: mod_base = OTHER; note = Nucleotide with phosphorothioate linkage
  modified_base 8: mod_base = OTHER; note = Thymine with phosphorothioate linkage
  modified_base 9: mod_base = OTHER; note = Nucleotide with phosphorothioate linkage
  modified_base 10: mod_base = OTHER; note = Thymine with phosphorothioate linkage
  modified_base 11: mod_base = OTHER; note = Nucleotide with phosphorothioate linkage
  modified_base 12: mod_base = OTHER; note = Nucleotide with phosphorothioate linkage
  modified_base 13: mod_base = OTHER; note = 5-methylcytosine with phosphorothioate linkage
  modified_base 14: mod_base = OTHER; note = Nucleotide with phosphorothioate linkage
  modified_base 15: mod_base = OTHER; note = Nucleotide with phosphorothioate linkage
  modified_base 16: mod_base = OTHER; note = Locked nucleic acid with phosphorothioate linkage
  modified_base 17: mod_base = OTHER; note = 2'-O-methoxyethyl modified nucleotide with phosphorothioate linkage
  modified_base 18: mod_base = OTHER; note = 2'-O-methoxyethyl modified thymine with phosphorothioate linkage
  modified_base 19: mod_base = OTHER; note = 2'-O-methoxyethyl modified nucleotide with phosphorothioate linkage
  modified_base 20: mod_base = OTHER; note = 2'-O-methoxyethyl 5-methylcytosine
  misc_feature 1..5: note = RNA
  misc_feature 6..15: note = DNA
  misc_feature 16..20: note = RNA
gcagaggtgtagcgaagtgc

SEQ ID NO: 1117 - DNA, 20 bp, synthetic construct
  source 1..20: mol_type = other DNA
  modified_base 1: mod_base = OTHER; note = 2'-O-methoxyethyl modified nucleotide with phosphorothioate linkage
  modified_base 2: mod_base = OTHER; note = 2'-O-methoxyethyl 5-methylcytosine with phosphorothioate linkage
  modified_base 3: mod_base = OTHER; note = 2'-O-methoxyethyl modified nucleotide with phosphorothioate linkage
  modified_base 4: mod_base = OTHER; note = Locked nucleic acid with phosphorothioate linkage
  modified_base 5: mod_base = OTHER; note = 2'-O-methoxyethyl modified nucleotide with phosphorothioate linkage
  modified_base 6: mod_base = OTHER; note = Nucleotide with phosphorothioate linkage
  modified_base 7: mod_base = OTHER; note = Nucleotide with phosphorothioate linkage
  modified_base 8: mod_base = OTHER; note = Thymine with phosphorothioate linkage
  modified_base 9: mod_base = OTHER; note = Nucleotide with phosphorothioate linkage
  modified_base 10: mod_base = OTHER; note = Thymine with phosphorothioate linkage
  modified_base 11: mod_base = OTHER; note = Nucleotide with phosphorothioate linkage
  modified_base 12: mod_base = OTHER; note = Nucleotide with phosphorothioate linkage
  modified_base 13: mod_base = OTHER; note = 5-methylcytosine with phosphorothioate linkage
  modified_base 14: mod_base = OTHER; note = Nucleotide with phosphorothioate linkage
  modified_base 15: mod_base = OTHER; note = Nucleotide with phosphorothioate linkage
  modified_base 16: mod_base = OTHER; note = 2'-O-methoxyethyl modified nucleotide with phosphorothioate linkage
  modified_base 17: mod_base = OTHER; note = 2'-O-methoxyethyl modified nucleotide with phosphorothioate linkage
  modified_base 18: mod_base = OTHER; note = 2'-O-methoxyethyl modified thymine with phosphorothioate linkage
  modified_base 19: mod_base = OTHER; note = 2'-O-methoxyethyl modified nucleotide with phosphorothioate linkage
  modified_base 20: mod_base = OTHER; note = Locked 5-methylcytosine
  misc_feature 1..5: note = RNA
  misc_feature 6..15: note = DNA
  misc_feature 16..20: note = RNA
gcagaggtgtagcgaagtgc

SEQ ID NO: 1118 - DNA, 20 bp, synthetic construct
  source 1..20: mol_type = other DNA
  modified_base 1: mod_base = OTHER; note = 2'-O-methoxyethyl modified nucleotide with phosphorothioate linkage
  modified_base 2: mod_base = OTHER; note = 2'-O-methoxyethyl 5-methylcytosine with phosphorothioate linkage
  modified_base 3: mod_base = OTHER; note = 2'-O-methoxyethyl modified nucleotide with phosphorothioate linkage
  modified_base 4: mod_base = OTHER; note = Locked nucleic acid with phosphorothioate linkage
  modified_base 5: mod_base = OTHER; note = 2'-O-methoxyethyl modified nucleotide with phosphorothioate linkage
  modified_base 6: mod_base = OTHER; note = Nucleotide with phosphorothioate linkage
  modified_base 7: mod_base = OTHER; note = Nucleotide with phosphorothioate linkage
  modified_base 8: mod_base = OTHER; note = Thymine with phosphorothioate linkage
  modified_base 9: mod_base = OTHER; note = Nucleotide with phosphorothioate linkage
  modified_base 10: mod_base = OTHER; note = Thymine with phosphorothioate linkage
  modified_base 11: mod_base = OTHER; note = Nucleotide with phosphorothioate linkage
  modified_base 12: mod_base = OTHER; note = Nucleotide with phosphorothioate linkage
  modified_base 13: mod_base = OTHER; note = 5-methylcytosine with phosphorothioate linkage
  modified_base 14: mod_base = OTHER; note = Nucleotide with phosphorothioate linkage
  modified_base 15: mod_base = OTHER; note = Nucleotide with phosphorothioate linkage
  modified_base 16: mod_base = OTHER; note = 2'-O-methoxyethyl modified nucleotide with phosphorothioate linkage
  modified_base 17: mod_base = OTHER; note = 2'-O-methoxyethyl modified nucleotide with phosphorothioate linkage
  modified_base 18: mod_base = OTHER; note = 2'-O-methoxyethyl modified thymine with phosphorothioate linkage
  modified_base 19: mod_base = OTHER; note = Locked nucleic acid with phosphorothioate linkage
  modified_base 20: mod_base = OTHER; note = 2'-O-methoxyethyl 5-methylcytosine
  misc_feature 1..5: note = RNA
  misc_feature 6..15: note = DNA
  misc_feature 16..20: note = RNA
gcagaggtgtagcgaagtgc

SEQ ID NO: 1119 - DNA, 20 bp, synthetic construct
  source 1..20: mol_type = other DNA
  modified_base 1: mod_base = OTHER; note = 2'-O-methoxyethyl modified nucleotide with phosphorothioate linkage
  modified_base 2: mod_base = OTHER; note = 2'-O-methoxyethyl 5-methylcytosine with phosphorothioate linkage
  modified_base 3: mod_base = OTHER; note = 2'-O-methoxyethyl modified nucleotide with phosphorothioate linkage
  modified_base 4: mod_base = OTHER; note = Locked nucleic acid with phosphorothioate linkage
  modified_base 5: mod_base = OTHER; note = 2'-O-methoxyethyl modified nucleotide with phosphorothioate linkage
  modified_base 6: mod_base = OTHER; note = Nucleotide with phosphorothioate linkage
  modified_base 7: mod_base = OTHER; note = Nucleotide with phosphorothioate linkage
  modified_base 8: mod_base = OTHER; note = Thymine with phosphorothioate linkage
  modified_base 9: mod_base = OTHER; note = Nucleotide with phosphorothioate linkage
  modified_base 10: mod_base = OTHER; note = Thymine with phosphorothioate linkage
  modified_base 11: mod_base = OTHER; note = Nucleotide with phosphorothioate linkage
  modified_base 12: mod_base = OTHER; note = Nucleotide with phosphorothioate linkage
  modified_base 13: mod_base = OTHER; note = 5-methylcytosine with phosphorothioate linkage
  modified_base 14: mod_base = OTHER; note = Nucleotide with phosphorothioate linkage
  modified_base 15: mod_base = OTHER; note = Nucleotide with phosphorothioate linkage
  modified_base 16: mod_base = OTHER; note = 2'-O-methoxyethyl modified nucleotide with phosphorothioate linkage
  modified_base 17: mod_base = OTHER; note = 2'-O-methoxyethyl modified nucleotide with phosphorothioate linkage
  modified_base 18: mod_base = OTHER; note = Locked thymine with phosphorothioate linkage
  modified_base 19: mod_base = OTHER; note = 2'-O-methoxyethyl modified nucleotide with phosphorothioate linkage
  modified_base 20: mod_base = OTHER; note = 2'-O-methoxyethyl 5-methylcytosine
  misc_feature 1..5: note = RNA
  misc_feature 6..15: note = DNA
  misc_feature 16..20: note = RNA
gcagaggtgtagcgaagtgc

SEQ ID NO: 1120 - DNA, 20 bp, synthetic construct
  source 1..20: mol_type = other DNA
  modified_base 1: mod_base = OTHER; note = 2'-O-methoxyethyl modified nucleotide with phosphorothioate linkage
  modified_base 2: mod_base = OTHER; note = 2'-O-methoxyethyl 5-methylcytosine with phosphorothioate linkage
  modified_base 3: mod_base = OTHER; note = 2'-O-methoxyethyl modified nucleotide with phosphorothioate linkage
  modified_base 4: mod_base = OTHER; note = Locked nucleic acid with phosphorothioate linkage
  modified_base 5: mod_base = OTHER; note = 2'-O-methoxyethyl modified nucleotide with phosphorothioate linkage
  modified_base 6: mod_base = OTHER; note = Nucleotide with phosphorothioate linkage
  modified_base 7: mod_base = OTHER; note = Nucleotide with phosphorothioate linkage
  modified_base 8: mod_base = OTHER; note = Thymine with phosphorothioate linkage
  modified_base 9: mod_base = OTHER; note = Nucleotide with phosphorothioate linkage
  modified_base 10: mod_base = OTHER; note = Thymine with phosphorothioate linkage
  modified_base 11: mod_base = OTHER; note = Nucleotide with phosphorothioate linkage
  modified_base 12: mod_base = OTHER; note = Nucleotide with phosphorothioate linkage
  modified_base 13: mod_base = OTHER; note = 5-methylcytosine with phosphorothioate linkage
  modified_base 14: mod_base = OTHER; note = Nucleotide with phosphorothioate linkage
  modified_base 15: mod_base = OTHER; note = Nucleotide with phosphorothioate linkage
  modified_base 16: mod_base = OTHER; note = 2'-O-methoxyethyl modified nucleotide with phosphorothioate linkage
  modified_base 17: mod_base = OTHER; note = Locked nucleic acid with phosphorothioate linkage
  modified_base 18: mod_base = OTHER; note = 2'-O-methoxyethyl modified thymine with phosphorothioate linkage
  modified_base 19: mod_base = OTHER; note = 2'-O-methoxyethyl modified nucleotide with phosphorothioate linkage
  modified_base 20: mod_base = OTHER; note = 2'-O-methoxyethyl 5-methylcytosine
  misc_feature 1..5: note = RNA
  misc_feature 6..15: note = DNA
  misc_feature 16..20: note = RNA
gcagaggtgtagcgaagtgc

SEQ ID NO: 1121 - DNA, 20 bp, synthetic construct
  source 1..20: mol_type = other DNA
  modified_base 1: mod_base = OTHER; note = 2'-O-methoxyethyl modified nucleotide with phosphorothioate linkage
  modified_base 2: mod_base = OTHER; note = 2'-O-methoxyethyl 5-methylcytosine with phosphorothioate linkage
  modified_base 3: mod_base = OTHER; note = 2'-O-methoxyethyl modified nucleotide with phosphorothioate linkage
  modified_base 4: mod_base = OTHER; note = Locked nucleic acid with phosphorothioate linkage
  modified_base 5: mod_base = OTHER; note = 2'-O-methoxyethyl modified nucleotide with phosphorothioate linkage
  modified_base 6: mod_base = OTHER; note = Nucleotide with phosphorothioate linkage
  modified_base 7: mod_base = OTHER; note = Nucleotide with phosphorothioate linkage
  modified_base 8: mod_base = OTHER; note = Thymine with phosphorothioate linkage
  modified_base 9: mod_base = OTHER; note = Nucleotide with phosphorothioate linkage
  modified_base 10: mod_base = OTHER; note = Thymine with phosphorothioate linkage
  modified_base 11: mod_base = OTHER; note = Nucleotide with phosphorothioate linkage
  modified_base 12: mod_base = OTHER; note = Nucleotide with phosphorothioate linkage
  modified_base 13: mod_base = OTHER; note = 5-methylcytosine with phosphorothioate linkage
  modified_base 14: mod_base = OTHER; note = Nucleotide with phosphorothioate linkage
  modified_base 15: mod_base = OTHER; note = Nucleotide with phosphorothioate linkage
  modified_base 16: mod_base = OTHER; note = Locked nucleic acid with phosphorothioate linkage
  modified_base 17: mod_base = OTHER; note = 2'-O-methoxyethyl modified nucleotide with phosphorothioate linkage
  modified_base 18: mod_base = OTHER; note = 2'-O-methoxyethyl modified thymine with phosphorothioate linkage
  modified_base 19: mod_base = OTHER; note = 2'-O-methoxyethyl modified nucleotide with phosphorothioate linkage
  modified_base 20: mod_base = OTHER; note = 2'-O-methoxyethyl 5-methylcytosine
  misc_feature 1..5: note = RNA
  misc_feature 6..15: note = DNA
  misc_feature 16..20: note = RNA
gcagaggtgtagcgaagtgc

SEQ ID NO: 1122 - DNA, 20 bp, synthetic construct
  source 1..20: mol_type = other DNA
  modified_base 1: mod_base = OTHER; note = 2'-O-methoxyethyl modified nucleotide with phosphorothioate linkage
  modified_base 2: mod_base = OTHER; note = 2'-O-methoxyethyl 5-methylcytosine with phosphorothioate linkage
  modified_base 3: mod_base = OTHER; note = 2'-O-methoxyethyl modified nucleotide with phosphorothioate linkage
  modified_base 4: mod_base = OTHER; note = Locked nucleic acid with phosphorothioate linkage
  modified_base 5: mod_base = OTHER; note = Locked nucleic acid with phosphorothioate linkage
  modified_base 6: mod_base = OTHER; note = Nucleotide with phosphorothioate linkage
  modified_base 7: mod_base = OTHER; note = Nucleotide with phosphorothioate linkage
  modified_base 8: mod_base = OTHER; note = Thymine with phosphorothioate linkage
  modified_base 9: mod_base = OTHER; note = Nucleotide with phosphorothioate linkage
  modified_base 10: mod_base = OTHER; note = Thymine with phosphorothioate linkage
  modified_base 11: mod_base = OTHER; note = Nucleotide with phosphorothioate linkage
  modified_base 12: mod_base = OTHER; note = Nucleotide with phosphorothioate linkage
  modified_base 13: mod_base = OTHER; note = 5-methylcytosine with phosphorothioate linkage
  modified_base 14: mod_base = OTHER; note = Nucleotide with phosphorothioate linkage
  modified_base 15: mod_base = OTHER; note = Nucleotide with phosphorothioate linkage
  modified_base 16: mod_base = OTHER; note = 2'-O-methoxyethyl modified nucleotide with phosphorothioate linkage
  modified_base 17: mod_base = OTHER; note = 2'-O-methoxyethyl modified nucleotide with phosphorothioate linkage
  modified_base 18: mod_base = OTHER; note = 2'-O-methoxyethyl modified thymine with phosphorothioate linkage
  modified_base 19: mod_base = OTHER; note = 2'-O-methoxyethyl modified nucleotide with phosphorothioate linkage
  modified_base 20: mod_base = OTHER; note = 2'-O-methoxyethyl 5-methylcytosine
  misc_feature 1..5: note = RNA
  misc_feature 6..15: note = DNA
  misc_feature 16..20: note = RNA
gcagaggtgtagcgaagtgc

SEQ ID NO: 1123 - DNA, 20 bp, synthetic construct
  source 1..20: mol_type = other DNA
  modified_base 1: mod_base = OTHER; note = 2'-O-methoxyethyl modified nucleotide with phosphorothioate linkage
  modified_base 2: mod_base = OTHER; note = 2'-O-methoxyethyl 5-methylcytosine with phosphorothioate linkage
  modified_base 3: mod_base = OTHER; note = 2'-O-methoxyethyl modified nucleotide with phosphorothioate linkage
  modified_base 4: mod_base = OTHER; note = 2'-O-methoxyethyl modified nucleotide with phosphorothioate linkage
  modified_base 5: mod_base = OTHER; note = 2'-O-methoxyethyl modified nucleotide with phosphorothioate linkage
  modified_base 6: mod_base = OTHER; note = Nucleotide with phosphorothioate linkage
  modified_base 7: mod_base = OTHER; note = Nucleotide with phosphorothioate linkage
  modified_base 8: mod_base = OTHER; note = Thymine with phosphorothioate linkage
  modified_base 9: mod_base = OTHER; note = Nucleotide with phosphorothioate linkage
  modified_base 10: mod_base = OTHER; note = Thymine with phosphorothioate linkage
  modified_base 11: mod_base = OTHER; note = Nucleotide with phosphorothioate linkage
  modified_base 12: mod_base = OTHER; note = Nucleotide with phosphorothioate linkage
  modified_base 13: mod_base = OTHER; note = 5-methylcytosine with phosphorothioate linkage
  modified_base 14: mod_base = OTHER; note = Nucleotide with phosphorothioate linkage
  modified_base 15: mod_base = OTHER; note = Nucleotide with phosphorothioate linkage
  modified_base 16: mod_base = OTHER; note = 2'-O-methoxyethyl modified nucleotide with phosphorothioate linkage
  modified_base 17: mod_base = OTHER; note = 2'-O-methoxyethyl modified nucleotide with phosphorothioate linkage
  modified_base 18: mod_base = OTHER; note = 2'-O-methoxyethyl modified thymine with phosphorothioate linkage
  modified_base 19: mod_base = OTHER; note = Locked nucleic acid with phosphorothioate linkage
  modified_base 20: mod_base = OTHER; note = Locked 5-methylcytosine
  misc_feature 1..5: note = RNA
  misc_feature 6..15: note = DNA
  misc_feature 16..20: note = RNA
gcagaggtgtagcgaagtgc

SEQ ID NO: 1124 - DNA, 20 bp, synthetic construct
  source 1..20: mol_type = other DNA
  modified_base 1: mod_base = OTHER; note = 2'-O-methoxyethyl modified nucleotide with phosphorothioate linkage
  modified_base 2: mod_base = OTHER; note = 2'-O-methoxyethyl 5-methylcytosine with phosphorothioate linkage
  modified_base 3: mod_base = OTHER; note = 2'-O-methoxyethyl modified nucleotide with phosphorothioate linkage
  modified_base 4: mod_base = OTHER; note = 2'-O-methoxyethyl modified nucleotide with phosphorothioate linkage
  modified_base 5: mod_base = OTHER; note = 2'-O-methoxyethyl modified nucleotide with phosphorothioate linkage
  modified_base 6: mod_base = OTHER; note = Nucleotide with phosphorothioate linkage
  modified_base 7: mod_base = OTHER; note = Nucleotide with phosphorothioate linkage
  modified_base 8: mod_base = OTHER; note = Thymine with phosphorothioate linkage
  modified_base 9: mod_base = OTHER; note = Nucleotide with phosphorothioate linkage
  modified_base 10: mod_base = OTHER; note = Thymine with phosphorothioate linkage
  modified_base 11: mod_base = OTHER; note = Nucleotide with phosphorothioate linkage
  modified_base 12: mod_base = OTHER; note = Nucleotide with phosphorothioate linkage
  modified_base 13: mod_base = OTHER; note = 5-methylcytosine with phosphorothioate linkage
  modified_base 14: mod_base = OTHER; note = Nucleotide with phosphorothioate linkage
  modified_base 15: mod_base = OTHER; note = Nucleotide with phosphorothioate linkage
  modified_base 16: mod_base = OTHER; note = 2'-O-methoxyethyl modified nucleotide with phosphorothioate linkage
  modified_base 17: mod_base = OTHER; note = 2'-O-methoxyethyl modified nucleotide with phosphorothioate linkage
  modified_base 18: mod_base = OTHER; note = Locked thymine with phosphorothioate linkage
  modified_base 19: mod_base = OTHER; note = 2'-O-methoxyethyl modified nucleotide with phosphorothioate linkage
  modified_base 20: mod_base = OTHER; note = Locked 5-methylcytosine
  misc_feature 1..5: note = RNA
  misc_feature 6..15: note = DNA
  misc_feature 16..20: note = RNA
gcagaggtgtagcgaagtgc

SEQ ID NO: 1125 - DNA, 20 bp, synthetic construct
  source 1..20: mol_type = other DNA
  modified_base 1: mod_base = OTHER; note = 2'-O-methoxyethyl modified nucleotide with phosphorothioate linkage
  modified_base 2: mod_base = OTHER; note = 2'-O-methoxyethyl 5-methylcytosine with phosphorothioate linkage
  modified_base 3: mod_base = OTHER; note = 2'-O-methoxyethyl modified nucleotide with phosphorothioate linkage
  modified_base 4: mod_base = OTHER; note = 2'-O-methoxyethyl modified nucleotide with phosphorothioate linkage
  modified_base 5: mod_base = OTHER; note = 2'-O-methoxyethyl modified nucleotide with phosphorothioate linkage
  modified_base 6: mod_base = OTHER; note = Nucleotide with phosphorothioate linkage
  modified_base 7: mod_base = OTHER; note = Nucleotide with phosphorothioate linkage
  modified_base 8: mod_base = OTHER; note = Thymine with phosphorothioate linkage
  modified_base 9: mod_base = OTHER; note = Nucleotide with phosphorothioate linkage
  modified_base 10: mod_base = OTHER; note = Thymine with phosphorothioate linkage
  modified_base 11: mod_base = OTHER; note = Nucleotide with phosphorothioate linkage
  modified_base 12: mod_base = OTHER; note = Nucleotide with phosphorothioate linkage
  modified_base 13: mod_base = OTHER; note = 5-methylcytosine with phosphorothioate linkage
  modified_base 14: mod_base = OTHER; note = Nucleotide with phosphorothioate linkage
  modified_base 15: mod_base = OTHER; note = Nucleotide with phosphorothioate linkage
  modified_base 16: mod_base = OTHER; note = 2'-O-methoxyethyl modified nucleotide with phosphorothioate linkage
  modified_base 17: mod_base = OTHER; note = 2'-O-methoxyethyl modified nucleotide with phosphorothioate linkage
  modified_base 18: mod_base = OTHER; note = Locked thymine with phosphorothioate linkage
  modified_base 19: mod_base = OTHER; note = Locked nucleic acid with phosphorothioate linkage
  modified_base 20: mod_base = OTHER; note = 2'-O-methoxyethyl 5-methylcytosine
  misc_feature 1..5: note = RNA
  misc_feature 6..15: note = DNA
  misc_feature 16..20: note = RNA
gcagaggtgtagcgaagtgc

SEQ ID NO: 1126 - DNA, 20 bp, synthetic construct
  source 1..20: mol_type = other DNA
  modified_base 1: mod_base = OTHER; note = 2'-O-methoxyethyl modified nucleotide with phosphorothioate linkage
  modified_base 2: mod_base = OTHER; note = 2'-O-methoxyethyl 5-methylcytosine with phosphorothioate linkage
  modified_base 3: mod_base = OTHER; note = 2'-O-methoxyethyl modified nucleotide with phosphorothioate linkage
  modified_base 4: mod_base = OTHER; note = 2'-O-methoxyethyl modified nucleotide with phosphorothioate linkage
  modified_base 5: mod_base = OTHER; note = 2'-O-methoxyethyl modified nucleotide with phosphorothioate linkage
  modified_base 6: mod_base = OTHER; note = Nucleotide with phosphorothioate linkage
  modified_base 7: mod_base = OTHER; note = Nucleotide with phosphorothioate linkage
  modified_base 8: mod_base = OTHER; note = Thymine with phosphorothioate linkage
  modified_base 9: mod_base = OTHER; note = Nucleotide with phosphorothioate linkage
  modified_base 10: mod_base = OTHER; note = Thymine with phosphorothioate linkage
  modified_base 11: mod_base = OTHER; note = Nucleotide with phosphorothioate linkage
  modified_base 12: mod_base = OTHER; note = Nucleotide with phosphorothioate linkage
  modified_base 13: mod_base = OTHER; note = 5-methylcytosine with phosphorothioate linkage
  modified_base 14: mod_base = OTHER; note = Nucleotide with phosphorothioate linkage
  modified_base 15: mod_base = OTHER; note = Nucleotide with phosphorothioate linkage
  modified_base 16: mod_base = OTHER; note = 2'-O-methoxyethyl modified nucleotide with phosphorothioate linkage
  modified_base 17: mod_base = OTHER; note = Locked nucleic acid with phosphorothioate linkage
  modified_base 18: mod_base = OTHER; note = 2'-O-methoxyethyl modified thymine with phosphorothioate linkage
  modified_base 19: mod_base = OTHER; note = 2'-O-methoxyethyl modified nucleotide with phosphorothioate linkage
  modified_base 20: mod_base = OTHER; note = Locked 5-methylcytosine
  misc_feature 1..5: note = RNA
  misc_feature 6..15: note = DNA
  misc_feature 16..20: note = RNA
gcagaggtgtagcgaagtgc

SEQ ID NO: 1127 - DNA, 20 bp, synthetic construct
  source 1..20: mol_type = other DNA
  modified_base 1: mod_base = OTHER; note = 2'-O-methoxyethyl modified nucleotide with phosphorothioate linkage
  modified_base 2: mod_base = OTHER; note = 2'-O-methoxyethyl 5-methylcytosine with phosphorothioate linkage
  modified_base 3: mod_base = OTHER; note = 2'-O-methoxyethyl modified nucleotide with phosphorothioate linkage
  modified_base 4: mod_base = OTHER; note = 2'-O-methoxyethyl modified nucleotide with phosphorothioate linkage
  modified_base 5: mod_base = OTHER; note = 2'-O-methoxyethyl modified nucleotide with phosphorothioate linkage
  modified_base 6: mod_base = OTHER; note = Nucleotide with phosphorothioate linkage
  modified_base 7: mod_base = OTHER; note = Nucleotide with phosphorothioate linkage
  modified_base 8: mod_base = OTHER; note = Thymine with phosphorothioate linkage
  modified_base 9: mod_base = OTHER; note = Nucleotide with phosphorothioate linkage
  modified_base 10: mod_base = OTHER; note = Thymine with phosphorothioate linkage
  modified_base 11: mod_base = OTHER; note = Nucleotide with phosphorothioate linkage
  modified_base 12: mod_base = OTHER; note = Nucleotide with phosphorothioate linkage
  modified_base 13: mod_base = OTHER; note = 5-methylcytosine with phosphorothioate linkage
  modified_base 14: mod_base = OTHER; note = Nucleotide with phosphorothioate linkage
  modified_base 15: mod_base = OTHER; note = Nucleotide with phosphorothioate linkage
  modified_base 16: mod_base = OTHER; note = 2'-O-methoxyethyl modified nucleotide with phosphorothioate linkage
  modified_base 17: mod_base = OTHER; note = Locked nucleic acid with phosphorothioate linkage
  modified_base 18: mod_base = OTHER; note = 2'-O-methoxyethyl modified thymine with phosphorothioate linkage
  modified_base 19: mod_base = OTHER; note = Locked nucleic acid with phosphorothioate linkage
  modified_base 20: mod_base = OTHER; note = 2'-O-methoxyethyl 5-methylcytosine
  misc_feature 1..5: note = RNA
  misc_feature 6..15: note = DNA
  misc_feature 16..20: note = RNA
gcagaggtgtagcgaagtgc

SEQ ID NO: 1128 - DNA, 20 bp, synthetic construct
  source 1..20: mol_type = other DNA
  modified_base 1: mod_base = OTHER; note = 2'-O-methoxyethyl modified nucleotide with phosphorothioate linkage
  modified_base 2: mod_base = OTHER; note = 2'-O-methoxyethyl 5-methylcytosine with phosphorothioate linkage
  modified_base 3: mod_base = OTHER; note = 2'-O-methoxyethyl modified nucleotide with phosphorothioate linkage
  modified_base 4: mod_base = OTHER; note = 2'-O-methoxyethyl modified nucleotide with phosphorothioate linkage
  modified_base 5: mod_base = OTHER; note = 2'-O-methoxyethyl modified nucleotide with phosphorothioate linkage
  modified_base 6: mod_base = OTHER; note = Nucleotide with phosphorothioate linkage
  modified_base 7: mod_base = OTHER; note = Nucleotide with phosphorothioate linkage
  modified_base 8: mod_base = OTHER; note = Thymine with phosphorothioate linkage
  modified_base 9: mod_base = OTHER; note = Nucleotide with phosphorothioate linkage
  modified_base 10: mod_base = OTHER; note = Thymine with phosphorothioate linkage
  modified_base 11: mod_base = OTHER; note = Nucleotide with phosphorothioate linkage
  modified_base 12: mod_base = OTHER; note = Nucleotide with phosphorothioate linkage
  modified_base 13: mod_base = OTHER; note = 5-methylcytosine with phosphorothioate linkage
  modified_base 14: mod_base = OTHER; note = Nucleotide with phosphorothioate linkage
  modified_base 15: mod_base = OTHER; note = Nucleotide with phosphorothioate linkage
  modified_base 16: mod_base = OTHER; note = 2'-O-methoxyethyl modified nucleotide with phosphorothioate linkage
  modified_base 17: mod_base = OTHER; note = Locked nucleic acid with phosphorothioate linkage
  modified_base 18: mod_base = OTHER; note = Locked thymine with phosphorothioate linkage
  modified_base 19: mod_base = OTHER; note = 2'-O-methoxyethyl modified nucleotide with phosphorothioate linkage
  modified_base 20: mod_base = OTHER; note = 2'-O-methoxyethyl 5-methylcytosine
  misc_feature 1..5: note = RNA
  misc_feature 6..15: note = DNA
  misc_feature 16..20: note = RNA
gcagaggtgtagcgaagtgc

SEQ ID NO: 1129 - DNA, 20 bp, synthetic construct
  source 1..20: mol_type = other DNA
  modified_base 1: mod_base = OTHER; note = 2'-O-methoxyethyl modified nucleotide with phosphorothioate linkage
  modified_base 2: mod_base = OTHER; note = 2'-O-methoxyethyl 5-methylcytosine with phosphorothioate linkage
  modified_base 3: mod_base = OTHER; note = 2'-O-methoxyethyl modified nucleotide with phosphorothioate linkage
  modified_base 4: mod_base = OTHER; note = 2'-O-methoxyethyl modified nucleotide with phosphorothioate linkage
  modified_base 5: mod_base = OTHER; note = 2'-O-methoxyethyl modified nucleotide with phosphorothioate linkage
  modified_base 6: mod_base = OTHER; note = Nucleotide with phosphorothioate linkage
  modified_base 7: mod_base = OTHER; note = Nucleotide with phosphorothioate linkage
  modified_base 8: mod_base = OTHER; note = Thymine with phosphorothioate linkage
  modified_base 9: mod_base = OTHER; note = Nucleotide with phosphorothioate linkage
  modified_base 10: mod_base = OTHER; note = Thymine with phosphorothioate linkage
  modified_base 11: mod_base = OTHER; note = Nucleotide with phosphorothioate linkage
  modified_base 12: mod_base = OTHER; note = Nucleotide with phosphorothioate linkage
  modified_base 13: mod_base = OTHER; note = 5-methylcytosine with phosphorothioate linkage
  modified_base 14: mod_base = OTHER; note = Nucleotide with phosphorothioate linkage
  modified_base 15: mod_base = OTHER; note = Nucleotide with phosphorothioate linkage
  modified_base 16: mod_base = OTHER; note = Locked nucleic acid with phosphorothioate linkage
  modified_base 17: mod_base = OTHER; note = 2'-O-methoxyethyl modified nucleotide with phosphorothioate linkage
  modified_base 18: mod_base = OTHER; note = 2'-O-methoxyethyl modified thymine with phosphorothioate linkage
  modified_base 19: mod_base = OTHER; note = 2'-O-methoxyethyl modified nucleotide with phosphorothioate linkage
  modified_base 20: mod_base = OTHER; note = Locked 5-methylcytosine
  misc_feature 1..5: note = RNA
  misc_feature 6..15: note = DNA
  misc_feature 16..20: note = RNA
gcagaggtgtagcgaagtgc

SEQ ID NO: 1130 - DNA, 20 bp, synthetic construct
  source 1..20: mol_type = other DNA
  modified_base 1: mod_base = OTHER; note = 2'-O-methoxyethyl modified nucleotide with phosphorothioate linkage
  modified_base 2: mod_base = OTHER; note = 2'-O-methoxyethyl 5-methylcytosine with phosphorothioate linkage
  modified_base 3: mod_base = OTHER; note = 2'-O-methoxyethyl modified nucleotide with phosphorothioate linkage
  modified_base 4: mod_base = OTHER; note = 2'-O-methoxyethyl modified nucleotide with phosphorothioate linkage
  modified_base 5: mod_base = OTHER; note = 2'-O-methoxyethyl modified nucleotide with phosphorothioate linkage
  modified_base 6: mod_base = OTHER; note = Nucleotide with phosphorothioate linkage
  modified_base 7: mod_base = OTHER; note = Nucleotide with phosphorothioate linkage
  modified_base 8: mod_base = OTHER; note = Thymine with phosphorothioate linkage
  modified_base 9: mod_base = OTHER; note = Nucleotide with phosphorothioate linkage
  modified_base 10: mod_base = OTHER; note = Thymine with phosphorothioate linkage
  modified_base 11: mod_base = OTHER; note = Nucleotide with phosphorothioate linkage
  modified_base 12: mod_base = OTHER; note = Nucleotide with phosphorothioate linkage
  modified_base 13: mod_base = OTHER; note = 5-methylcytosine with phosphorothioate linkage
  modified_base 14: mod_base = OTHER; note = Nucleotide with phosphorothioate linkage
  modified_base 15: mod_base = OTHER; note = Nucleotide with phosphorothioate linkage
  modified_base 16: mod_base = OTHER; note = Locked nucleic acid with phosphorothioate linkage
  modified_base 17: mod_base = OTHER; note = 2'-O-methoxyethyl modified nucleotide with phosphorothioate linkage
  modified_base 18: mod_base = OTHER; note = 2'-O-methoxyethyl modified thymine with phosphorothioate linkage
  modified_base 19: mod_base = OTHER; note = Locked nucleic acid with phosphorothioate linkage
  modified_base 20: mod_base = OTHER; note = 2'-O-methoxyethyl 5-methylcytosine
  misc_feature 1..5: note = RNA
  misc_feature 6..15: note = DNA
  misc_feature 16..20: note = RNA
gcagaggtgtagcgaagtgc

SEQ ID NO: 1131 - DNA, 20 bp, synthetic construct
  source 1..20: mol_type = other DNA
  modified_base 1: mod_base = OTHER; note = 2'-O-methoxyethyl modified nucleotide with phosphorothioate linkage
  modified_base 2: mod_base = OTHER; note = 2'-O-methoxyethyl 5-methylcytosine with phosphorothioate linkage
  modified_base 3: mod_base = OTHER; note = 2'-O-methoxyethyl modified nucleotide with phosphorothioate linkage
  modified_base 4: mod_base = OTHER; note = 2'-O-methoxyethyl modified nucleotide with phosphorothioate linkage
  modified_base 5: mod_base = OTHER; note = 2'-O-methoxyethyl modified nucleotide with phosphorothioate linkage
  modified_base 6: mod_base = OTHER; note = Nucleotide with phosphorothioate linkage
  modified_base 7: mod_base = OTHER; note = Nucleotide with phosphorothioate linkage
  modified_base 8: mod_base = OTHER; note = Thymine with phosphorothioate linkage
  modified_base 9: mod_base = OTHER; note = Nucleotide with phosphorothioate linkage
  modified_base 10: mod_base = OTHER; note = Thymine with phosphorothioate linkage
  modified_base 11: mod_base = OTHER; note = Nucleotide with phosphorothioate linkage
  modified_base 12: mod_base = OTHER; note = Nucleotide with phosphorothioate linkage
  modified_base 13: mod_base = OTHER; note = 5-methylcytosine with phosphorothioate linkage
  modified_base 14: mod_base = OTHER; note = Nucleotide with phosphorothioate linkage
  modified_base 15: mod_base = OTHER; note = Nucleotide with phosphorothioate linkage
  modified_base 16: mod_base = OTHER; note = Locked nucleic acid with phosphorothioate linkage
  modified_base 17: mod_base = OTHER; note = 2'-O-methoxyethyl modified nucleotide with phosphorothioate linkage
  modified_base 18: mod_base = OTHER; note = Locked thymine with phosphorothioate linkage
  modified_base 19: mod_base = OTHER; note = 2'-O-methoxyethyl modified nucleotide with phosphorothioate linkage
  modified_base 20: mod_base = OTHER; note = 2'-O-methoxyethyl 5-methylcytosine
  misc_feature 1..5: note = RNA
  misc_feature 6..15: note = DNA
  misc_feature 16..20: note = RNA
gcagaggtgtagcgaagtgc

SEQ ID NO: 1132 - DNA, 20 bp, synthetic construct
  source 1..20: mol_type = other DNA
  modified_base 1: mod_base = OTHER; note = 2'-O-methoxyethyl modified nucleotide with phosphorothioate linkage
  modified_base 2: mod_base = OTHER; note = 2'-O-methoxyethyl 5-methylcytosine with phosphorothioate linkage
  modified_base 3: mod_base = OTHER; note = 2'-O-methoxyethyl modified nucleotide with phosphorothioate linkage
  modified_base 4: mod_base = OTHER; note = 2'-O-methoxyethyl modified nucleotide with phosphorothioate linkage
  modified_base 5: mod_base = OTHER; note = 2'-O-methoxyethyl modified nucleotide with phosphorothioate linkage
  modified_base 6: mod_base = OTHER; note = Nucleotide with phosphorothioate linkage
  modified_base 7: mod_base = OTHER; note = Nucleotide with phosphorothioate linkage
  modified_base 8: mod_base = OTHER; note = Thymine with phosphorothioate linkage
  modified_base 9: mod_base = OTHER; note = Nucleotide with phosphorothioate linkage
  modified_base 10: mod_base = OTHER; note = Thymine with phosphorothioate linkage
  modified_base 11: mod_base = OTHER; note = Nucleotide with phosphorothioate linkage
  modified_base 12: mod_base = OTHER; note = Nucleotide with phosphorothioate linkage
  modified_base 13: mod_base = OTHER; note = 5-methylcytosine with phosphorothioate linkage
  modified_base 14: mod_base = OTHER; note = Nucleotide with phosphorothioate linkage
  modified_base 15: mod_base = OTHER; note = Nucleotide with phosphorothioate linkage
  modified_base 16: mod_base = OTHER; note = Locked nucleic acid with phosphorothioate linkage
  modified_base 17: mod_base = OTHER; note = Locked nucleic acid with phosphorothioate linkage
  modified_base 18: mod_base = OTHER; note = 2'-O-methoxyethyl modified thymine with phosphorothioate linkage
  modified_base 19: mod_base = OTHER; note = 2'-O-methoxyethyl modified nucleotide with phosphorothioate linkage
  modified_base 20: mod_base = OTHER; note = 2'-O-methoxyethyl 5-methylcytosine
  misc_feature 1..5: note = RNA
  misc_feature 6..15: note = DNA
  misc_feature 16..20: note = RNA
gcagaggtgtagcgaagtgc

SEQ ID NO: 1133 - DNA, 20 bp, synthetic construct
  source 1..20: mol_type = other DNA
  modified_base 1: mod_base = OTHER; note = 2'-O-methoxyethyl modified nucleotide with phosphorothioate linkage
  modified_base 2: mod_base = OTHER; note = 2'-O-methoxyethyl 5-methylcytosine with phosphorothioate linkage
  modified_base 3: mod_base = OTHER; note = 2'-O-methoxyethyl modified nucleotide with phosphorothioate linkage
  modified_base 4: mod_base = OTHER; note = 2'-O-methoxyethyl modified nucleotide with phosphorothioate linkage
  modified_base 5: mod_base = OTHER; note = Locked nucleic acid with phosphorothioate linkage
  modified_base 6: mod_base = OTHER; note = Nucleotide with phosphorothioate linkage
  modified_base 7: mod_base = OTHER; note = Nucleotide with phosphorothioate linkage
  modified_base 8: mod_base = OTHER; note = Thymine with phosphorothioate linkage
  modified_base 9: mod_base = OTHER; note = Nucleotide with phosphorothioate linkage
  modified_base 10: mod_base = OTHER; note = Thymine with phosphorothioate linkage
  modified_base 11: mod_base = OTHER; note = Nucleotide with phosphorothioate linkage
  modified_base 12: mod_base = OTHER; note = Nucleotide with phosphorothioate linkage
  modified_base 13: mod_base = OTHER; note = 5-methylcytosine with phosphorothioate linkage
  modified_base 14: mod_base = OTHER; note = Nucleotide with phosphorothioate linkage
  modified_base 15: mod_base = OTHER; note = Nucleotide with phosphorothioate linkage
  modified_base 16: mod_base = OTHER; note = 2'-O-methoxyethyl modified nucleotide with phosphorothioate linkage
  modified_base 17: mod_base = OTHER; note = 2'-O-methoxyethyl modified nucleotide with phosphorothioate linkage
  modified_base 18: mod_base = OTHER; note = 2'-O-methoxyethyl modified thymine with phosphorothioate linkage
  modified_base 19: mod_base = OTHER; note = 2'-O-methoxyethyl modified nucleotide with phosphorothioate linkage
  modified_base 20: mod_base = OTHER; note = Locked 5-methylcytosine
  misc_feature 1..5: note = RNA
  misc_feature 6..15: note = DNA
  misc_feature 16..20: note = RNA
gcagaggtgtagcgaagtgc

SEQ ID NO: 1134 - DNA, 20 bp, synthetic construct
  source 1..20: mol_type = other DNA
  modified_base 1: mod_base = OTHER; note = Tert-butylguanidine bridged nucleic acid with phosphorothioate linkage
  modified_base 2: mod_base = OTHER; note = 2'-O-methoxyethyl 5-methylcytosine with phosphorothioate linkage
  modified_base 3: mod_base = OTHER; note = 2'-O-methoxyethyl modified nucleotide with phosphorothioate linkage
  modified_base 4: mod_base = OTHER; note = 2'-O-methoxyethyl modified nucleotide with phosphorothioate linkage
  modified_base 5: mod_base = OTHER; note = 2'-O-methoxyethyl modified nucleotide with phosphorothioate linkage
  modified_base 6: mod_base = OTHER; note = Nucleotide with phosphorothioate linkage
  modified_base 7: mod_base = OTHER; note = Nucleotide with phosphorothioate linkage
  modified_base 8: mod_base = OTHER; note = Thymine with phosphorothioate linkage
  modified_base 9: mod_base = OTHER; note = Nucleotide with phosphorothioate linkage
  modified_base 10: mod_base = OTHER; note = Nucleotide with phosphorothioate linkage
  modified_base 11: mod_base = OTHER; note = 2'-O-methyl modified abasic nucleotide with phosphorothioate linkage
  modified_base 12: mod_base = OTHER; note = Nucleotide with phosphorothioate linkage
  modified_base 13: mod_base = OTHER; note = 5-methylcytosine with phosphorothioate linkage
  modified_base 14: mod_base = OTHER; note = Nucleotide with phosphorothioate linkage
  modified_base 15: mod_base = OTHER; note = Nucleotide with phosphorothioate linkage
  modified_base 16: mod_base = OTHER; note = 2'-O-methoxyethyl modified nucleotide with phosphorothioate linkage
  modified_base 17: mod_base = OTHER; note = 2'-O-methoxyethyl modified nucleotide with phosphorothioate linkage
  modified_base 18: mod_base = OTHER; note = 2'-O-methoxyethyl modified thymine with phosphorothioate linkage
  modified_base 19: mod_base = OTHER; note = 2'-O-methoxyethyl modified nucleotide with phosphorothioate linkage
  modified_base 20: mod_base = OTHER; note = 2'-O-methoxyethyl 5-methylcytosine
  misc_feature 1..5: note = RNA
  misc_feature 6..10: note = DNA
  misc_feature 11: note = RNA
  misc_feature 12..15: note = DNA
  misc_feature 16..20: note = RNA
gcagaggtgangcgaagtgc

SEQ ID NO: 1135 - DNA, 20 bp, synthetic construct
  source 1..20: mol_type = other DNA
  modified_base 1: mod_base = OTHER; note = 2'-O-methoxyethyl modified nucleotide with phosphorothioate linkage
  modified_base 2: mod_base = OTHER; note = Tert-butylguanidine bridged 5-methylcytosine with phosphorothioate linkage
  modified_base 3: mod_base = OTHER; note = 2'-O-methoxyethyl modified nucleotide with phosphorothioate linkage
  modified_base 4: mod_base = OTHER; note = 2'-O-methoxyethyl modified nucleotide with phosphorothioate linkage
  modified_base 5: mod_base = OTHER; note = 2'-O-methoxyethyl modified nucleotide with phosphorothioate linkage
  modified_base 6: mod_base = OTHER; note = Nucleotide with phosphorothioate linkage
  modified_base 7: mod_base = OTHER; note = Nucleotide with phosphorothioate linkage
  modified_base 8: mod_base = OTHER; note = Thymine with phosphorothioate linkage
  modified_base 9: mod_base = OTHER; note = Nucleotide with phosphorothioate linkage
  modified_base 10: mod_base = OTHER; note = Nucleotide with phosphorothioate linkage
  modified_base 11: mod_base = OTHER; note = 2'-O-methyl modified abasic nucleotide with phosphorothioate linkage
  modified_base 12: mod_base = OTHER; note = Nucleotide with phosphorothioate linkage
  modified_base 13: mod_base = OTHER; note = 5-methylcytosine with phosphorothioate linkage
  modified_base 14: mod_base = OTHER; note = Nucleotide with phosphorothioate linkage
  modified_base 15: mod_base = OTHER; note = Nucleotide with phosphorothioate linkage
  modified_base 16: mod_base = OTHER; note = 2'-O-methoxyethyl modified nucleotide with phosphorothioate linkage
  modified_base 17: mod_base = OTHER; note = 2'-O-methoxyethyl modified nucleotide with phosphorothioate linkage
  modified_base 18: mod_base = OTHER; note = 2'-O-methoxyethyl modified thymine with phosphorothioate linkage
  modified_base 19: mod_base = OTHER; note = 2'-O-methoxyethyl modified nucleotide with phosphorothioate linkage
  modified_base 20: mod_base = OTHER; note = 2'-O-methoxyethyl 5-methylcytosine
  misc_feature 1..5: note = RNA
  misc_feature 6..10: note = DNA
  misc_feature 11: note = RNA
  misc_feature 12..15: note = DNA
  misc_feature 16..20: note = RNA
gcagaggtgangcgaagtgc

SEQ ID NO: 1136 - DNA, 20 bp, synthetic construct
  source 1..20: mol_type = other DNA
  modified_base 1: mod_base = OTHER; note = 2'-O-methoxyethyl modified nucleotide with phosphorothioate linkage
  modified_base 2: mod_base = OTHER; note = 2'-O-methoxyethyl 5-methylcytosine with phosphorothioate linkage
  modified_base 3: mod_base = OTHER; note = Tert-butylguanidine bridged nucleotide with phosphorothioate linkage
  modified_base 4: mod_base = OTHER; note = 2'-O-methoxyethyl modified nucleotide with phosphorothioate linkage
  modified_base 5: mod_base = OTHER; note = 2'-O-methoxyethyl modified nucleotide with phosphorothioate linkage
  modified_base 6: mod_base = OTHER; note = Nucleotide with phosphorothioate linkage
  modified_base 7: mod_base = OTHER; note = Nucleotide with phosphorothioate linkage
  modified_base 8: mod_base = OTHER; note = Thymine with phosphorothioate linkage
  modified_base 9: mod_base = OTHER; note = Nucleotide with phosphorothioate linkage
  modified_base 10: mod_base = OTHER; note = Nucleotide with phosphorothioate linkage
  modified_base 11: mod_base = OTHER; note = 2'-O-methyl modified abasic nucleotide with phosphorothioate linkage
  modified_base 12: mod_base = OTHER; note = Nucleotide with phosphorothioate linkage
  modified_base 13: mod_base = OTHER; note = 5-methylcytosine with phosphorothioate linkage
  modified_base 14: mod_base = OTHER; note = Nucleotide with phosphorothioate linkage
  modified_base 15: mod_base = OTHER; note = Nucleotide with phosphorothioate linkage
  modified_base 16: mod_base = OTHER; note = 2'-O-methoxyethyl modified nucleotide with phosphorothioate linkage
  modified_base 17: mod_base = OTHER; note = 2'-O-methoxyethyl modified nucleotide with phosphorothioate linkage
  modified_base 18: mod_base = OTHER; note = 2'-O-methoxyethyl modified thymine with phosphorothioate linkage
  modified_base 19: mod_base = OTHER; note = 2'-O-methoxyethyl modified nucleotide with phosphorothioate linkage
  modified_base 20: mod_base = OTHER; note = 2'-O-methoxyethyl 5-methylcytosine
  misc_feature 1..5: note = RNA
  misc_feature 6..10: note = DNA
  misc_feature 11: note = RNA
  misc_feature 12..15: note = DNA
  misc_feature 16..20: note = RNA
gcagaggtgangcgaagtgc

SEQ ID NO: 1137 - DNA, 20 bp, synthetic construct
  source 1..20: mol_type = other DNA
  modified_base 1: mod_base = OTHER; note = 2'-O-methoxyethyl modified nucleotide with phosphorothioate linkage
  modified_base 2: mod_base = OTHER; note = 2'-O-methoxyethyl 5-methylcytosine with phosphorothioate linkage
  modified_base 3: mod_base = OTHER; note = 2'-O-methoxyethyl modified nucleotide with phosphorothioate linkage
  modified_base 4: mod_base = OTHER; note = Tert-butylguanidine bridged nucleic acid with phosphorothioate linkage
  modified_base 5: mod_base = OTHER; note = 2'-O-methoxyethyl modified nucleotide with phosphorothioate linkage
  modified_base 6: mod_base = OTHER; note = Nucleotide with phosphorothioate linkage
  modified_base 7: mod_base = OTHER; note = Nucleotide with phosphorothioate linkage
  modified_base 8: mod_base = OTHER; note = Thymine with phosphorothioate linkage
  modified_base 9: mod_base = OTHER; note = Nucleotide with phosphorothioate linkage
  modified_base 10: mod_base = OTHER; note = Nucleotide with phosphorothioate linkage
  modified_base 11: mod_base = OTHER; note = 2'-O-methyl modified abasic nucleotide with phosphorothioate linkage
  modified_base 12: mod_base = OTHER; note = Nucleotide with phosphorothioate linkage
  modified_base 13: mod_base = OTHER; note = 5-methylcytosine with phosphorothioate linkage
  modified_base 14: mod_base = OTHER; note = Nucleotide with phosphorothioate linkage
  modified_base 15: mod_base = OTHER; note = Nucleotide with phosphorothioate linkage
  modified_base 16: mod_base = OTHER; note = 2'-O-methoxyethyl modified nucleotide with phosphorothioate linkage
  modified_base 17: mod_base = OTHER; note = 2'-O-methoxyethyl modified nucleotide with phosphorothioate linkage
  modified_base 18: mod_base = OTHER; note = 2'-O-methoxyethyl modified thymine with phosphorothioate linkage
  modified_base 19: mod_base = OTHER; note = 2'-O-methoxyethyl modified nucleotide with phosphorothioate linkage
  modified_base 20: mod_base = OTHER; note = 2'-O-methoxyethyl 5-methylcytosine
  misc_feature 1..5: note = RNA
  misc_feature 6..10: note = DNA
  misc_feature 11: note = RNA
  misc_feature 12..15: note = DNA
  misc_feature 16..20: note = RNA
gcagaggtgangcgaagtgc

SEQ ID NO: 1138 - DNA, 20 bp, synthetic construct
  source 1..20: mol_type = other DNA
  modified_base 1: mod_base = OTHER; note = 2'-O-methoxyethyl modified nucleotide with phosphorothioate linkage
  modified_base 2: mod_base = OTHER; note = 2'-O-methoxyethyl 5-methylcytosine with phosphorothioate linkage
  modified_base 3: mod_base = OTHER; note = 2'-O-methoxyethyl modified nucleotide with phosphorothioate linkage
  modified_base 4: mod_base = OTHER; note = 2'-O-methoxyethyl modified nucleotide with phosphorothioate linkage
  modified_base 5: mod_base = OTHER; note = Tert-butylguanidine bridged nucleotide with phosphorothioate linkage
  modified_base 6: mod_base = OTHER; note = Nucleotide with phosphorothioate linkage
  modified_base 7: mod_base = OTHER; note = Nucleotide with phosphorothioate linkage
  modified_base 8: mod_base = OTHER; note = Thymine with phosphorothioate linkage
  modified_base 9: mod_base = OTHER; note = Nucleotide with phosphorothioate linkage
  modified_base 10: mod_base = OTHER; note = Nucleotide with phosphorothioate linkage
  modified_base 11: mod_base = OTHER; note = 2'-O-methyl modified abasic nucleotide with phosphorothioate linkage
  modified_base 12: mod_base = OTHER; note = Nucleotide with phosphorothioate linkage
  modified_base 13: mod_base = OTHER; note = 5-methylcytosine with phosphorothioate linkage
  modified_base 14: mod_base = OTHER; note = Nucleotide with phosphorothioate linkage
  modified_base 15: mod_base = OTHER; note = Nucleotide with phosphorothioate linkage
  modified_base 16: mod_base = OTHER; note = 2'-O-methoxyethyl modified nucleotide with phosphorothioate linkage
  modified_base 17: mod_base = OTHER; note = 2'-O-methoxyethyl modified nucleotide with phosphorothioate linkage
  modified_base 18: mod_base = OTHER; note = 2'-O-methoxyethyl modified thymine with phosphorothioate linkage
  modified_base 19: mod_base = OTHER; note = 2'-O-methoxyethyl modified nucleotide with phosphorothioate linkage
  modified_base 20: mod_base = OTHER; note = 2'-O-methoxyethyl 5-methylcytosine
  misc_feature 1..5: note = RNA
  misc_feature 6..10: note = DNA
  misc_feature 11: note = RNA
  misc_feature 12..15: note = DNA
  misc_feature 16..20: note = RNA
gcagaggtgangcgaagtgc

SEQ ID NO: 1139 - DNA, 20 bp, synthetic construct
  source 1..20: mol_type = other DNA
  modified_base 1: mod_base = OTHER; note = 2'-O-methoxyethyl modified nucleotide with phosphorothioate linkage
  modified_base 2: mod_base = OTHER; note = 2'-O-methoxyethyl 5-methylcytosine with phosphorothioate linkage
  modified_base 3: mod_base = OTHER; note = 2'-O-methoxyethyl modified nucleotide with phosphorothioate linkage
  modified_base 4: mod_base = OTHER; note = 2'-O-methoxyethyl modified nucleotide with phosphorothioate linkage
  modified_base 5: mod_base = OTHER; note = 2'-O-methoxyethyl modified nucleotide with phosphorothioate linkage
  modified_base 6: mod_base = OTHER; note = Nucleotide with phosphorothioate linkage
  modified_base 7: mod_base = OTHER; note = Nucleotide with phosphorothioate linkage
  modified_base 8: mod_base = OTHER; note = Thymine with phosphorothioate linkage
  modified_base 9: mod_base = OTHER; note = Nucleotide with phosphorothioate linkage
  modified_base 10: mod_base = OTHER; note = Nucleotide with phosphorothioate linkage
  modified_base 11: mod_base = OTHER; note = 2'-O-methyl modified abasic nucleotide with phosphorothioate linkage
  modified_base 12: mod_base = OTHER; note = Nucleotide with phosphorothioate linkage
  modified_base 13: mod_base = OTHER; note = 5-methylcytosine with phosphorothioate linkage
  modified_base 14: mod_base = OTHER; note = Nucleotide with phosphorothioate linkage
  modified_base 15: mod_base = OTHER; note = Nucleotide with phosphorothioate linkage
  modified_base 16: mod_base = OTHER; note = Tert-butylguanidine bridged nucleotide with phosphorothioate linkage
  modified_base 17: mod_base = OTHER; note = 2'-O-methoxyethyl modified nucleotide with phosphorothioate linkage
  modified_base 18: mod_base = OTHER; note = 2'-O-methoxyethyl modified thymine with phosphorothioate linkage
  modified_base 19: mod_base = OTHER; note = 2'-O-methoxyethyl modified nucleotide with phosphorothioate linkage
  modified_base 20: mod_base = OTHER; note = 2'-O-methoxyethyl 5-methylcytosine
  misc_feature 1..5: note = RNA
  misc_feature 6..10: note = DNA
  misc_feature 11: note = RNA
  misc_feature 12..15: note = DNA
  misc_feature 16..20: note = RNA
gcagaggtgangcgaagtgc

SEQ ID NO: 1140 - DNA, 20 bp, synthetic construct
  source 1..20: mol_type = other DNA
  modified_base 1: mod_base = OTHER; note = 2'-O-methoxyethyl modified nucleotide with phosphorothioate linkage
  modified_base 2: mod_base = OTHER; note = 2'-O-methoxyethyl 5-methylcytosine with phosphorothioate linkage
  modified_base 3: mod_base = OTHER; note = 2'-O-methoxyethyl modified nucleotide with phosphorothioate linkage
  modified_base 4: mod_base = OTHER; note = 2'-O-methoxyethyl modified nucleotide with phosphorothioate linkage
  modified_base 5: mod_base = OTHER; note = 2'-O-methoxyethyl modified nucleotide with phosphorothioate linkage
  modified_base 6: mod_base = OTHER; note = Nucleotide with phosphorothioate linkage
  modified_base 7: mod_base = OTHER; note = Nucleotide with phosphorothioate linkage
  modified_base 8: mod_base = OTHER; note = Thymine with phosphorothioate linkage
  modified_base 9: mod_base = OTHER; note = Nucleotide with phosphorothioate linkage
  modified_base 10: mod_base = OTHER; note = Nucleotide with phosphorothioate linkage
  modified_base 11: mod_base = OTHER; note = 2'-O-methyl modified abasic nucleotide with phosphorothioate linkage
  modified_base 12: mod_base = OTHER; note = Nucleotide with phosphorothioate linkage
  modified_base 13: mod_base = OTHER; note = 5-methylcytosine with phosphorothioate linkage
  modified_base 14: mod_base = OTHER; note = Nucleotide with phosphorothioate linkage
  modified_base 15: mod_base = OTHER; note = Nucleotide with phosphorothioate linkage
  modified_base 16: mod_base = OTHER; note = 2'-O-methoxyethyl modified nucleotide with phosphorothioate linkage
  modified_base 17: mod_base = OTHER; note = Tert-butylguanidine bridged nucleic acid with phosphorothioate linkage
  modified_base 18: mod_base = OTHER; note = 2'-O-methoxyethyl modified thymine with phosphorothioate linkage
  modified_base 19: mod_base = OTHER; note = 2'-O-methoxyethyl modified nucleotide with phosphorothioate linkage
  modified_base 20: mod_base = OTHER; note = 2'-O-methoxyethyl 5-methylcytosine
  misc_feature 1..5: note = RNA
  misc_feature 6..10: note = DNA
  misc_feature 11: note = RNA
  misc_feature 12..15: note = DNA
  misc_feature 16..20: note = RNA
gcagaggtgangcgaagtgc

SEQ ID NO: 1141 - DNA, 20 bp, synthetic construct
  source 1..20: mol_type = other DNA
  modified_base 1: mod_base = OTHER; note = 2'-O-methoxyethyl modified nucleotide with phosphorothioate linkage
  modified_base 2: mod_base = OTHER; note = 2'-O-methoxyethyl 5-methylcytosine with phosphorothioate linkage
  modified_base 3: mod_base = OTHER; note = 2'-O-methoxyethyl modified nucleotide with phosphorothioate linkage
  modified_base 4: mod_base = OTHER; note = 2'-O-methoxyethyl modified nucleotide with phosphorothioate linkage
  modified_base 5: mod_base = OTHER; note = 2'-O-methoxyethyl modified nucleotide with phosphorothioate linkage
  modified_base 6: mod_base = OTHER; note = Nucleotide with phosphorothioate linkage
  modified_base 7: mod_base = OTHER; note = Nucleotide with phosphorothioate linkage
  modified_base 8: mod_base = OTHER; note = Thymine with phosphorothioate linkage
  modified_base 9: mod_base = OTHER; note = Nucleotide with phosphorothioate linkage
  modified_base 10: mod_base = OTHER; note = Nucleotide with phosphorothioate linkage
  modified_base 11: mod_base = OTHER; note = 2'-O-methyl modified abasic nucleotide with phosphorothioate linkage
  modified_base 12: mod_base = OTHER; note = Nucleotide with phosphorothioate linkage
  modified_base 13: mod_base = OTHER; note = 5-methylcytosine with phosphorothioate linkage
  modified_base 14: mod_base = OTHER; note = Nucleotide with phosphorothioate linkage
  modified_base 15: mod_base = OTHER; note = Nucleotide with phosphorothioate linkage
  modified_base 16: mod_base = OTHER; note = 2'-O-methoxyethyl modified nucleotide with phosphorothioate linkage
  modified_base 17: mod_base = OTHER; note = 2'-O-methoxyethyl modified nucleotide with phosphorothioate linkage
  modified_base 18: mod_base = OTHER; note = Tert-butylguanidine bridged thymine with phosphorothioate linkage
  modified_base 19: mod_base = OTHER; note = 2'-O-methoxyethyl modified nucleotide with phosphorothioate linkage
  modified_base 20: mod_base = OTHER; note = 2'-O-methoxyethyl 5-methylcytosine
  misc_feature 1..5: note = RNA
  misc_feature 6..10: note = DNA
  misc_feature 11: note = RNA
  misc_feature 12..15: note = DNA
  misc_feature 16..20: note = RNA
gcagaggtgangcgaagtgc

SEQ ID NO: 1142 - DNA, 20 bp, synthetic construct
  source 1..20: mol_type = other DNA
  modified_base 1: mod_base = OTHER; note = 2'-O-methoxyethyl modified nucleotide with phosphorothioate linkage
  modified_base 2: mod_base = OTHER; note = 2'-O-methoxyethyl 5-methylcytosine with phosphorothioate linkage
  modified_base 3: mod_base = OTHER; note = 2'-O-methoxyethyl modified nucleotide with phosphorothioate linkage
  modified_base 4: mod_base = OTHER; note = 2'-O-methoxyethyl modified nucleotide with phosphorothioate linkage
  modified_base 5: mod_base = OTHER; note = 2'-O-methoxyethyl modified nucleotide with phosphorothioate linkage
  modified_base 6: mod_base = OTHER; note = Nucleotide with phosphorothioate linkage
  modified_base 7: mod_base = OTHER; note = Nucleotide with phosphorothioate linkage
  modified_base 8: mod_base = OTHER; note = Thymine with phosphorothioate linkage
  modified_base 9: mod_base = OTHER; note = Nucleotide with phosphorothioate linkage
  modified_base 10: mod_base = OTHER; note = Nucleotide with phosphorothioate linkage
  modified_base 11: mod_base = OTHER; note = 2'-O-methyl modified abasic nucleotide with phosphorothioate linkage
  modified_base 12: mod_base = OTHER; note = Nucleotide with phosphorothioate linkage
  modified_base 13: mod_base = OTHER; note = 5-methylcytosine with phosphorothioate linkage
  modified_base 14: mod_base = OTHER; note = Nucleotide with phosphorothioate linkage
  modified_base 15: mod_base = OTHER; note = Nucleotide with phosphorothioate linkage
  modified_base 16: mod_base = OTHER; note = 2'-O-methoxyethyl modified nucleotide with phosphorothioate linkage
  modified_base 17: mod_base = OTHER; note = 2'-O-methoxyethyl modified nucleotide with phosphorothioate linkage
  modified_base 18: mod_base = OTHER; note = 2'-O-methoxyethyl modified thymine with phosphorothioate linkage
  modified_base 19: mod_base = OTHER; note = Tert-butylguanidine bridged nucleic acid with phosphorothioate linkage
  modified_base 20: mod_base = OTHER; note = 2'-O-methoxyethyl 5-methylcytosine
  misc_feature 1..5: note = RNA
  misc_feature 6..10: note = DNA
  misc_feature 11: note = RNA
  misc_feature 12..15: note = DNA
  misc_feature 16..20: note = RNA
gcagaggtgangcgaagtgc

SEQ ID NO: 1143 - DNA, 20 bp, synthetic construct
  source 1..20: mol_type = other DNA
  modified_base 1: mod_base = OTHER; note = 2'-O-methoxyethyl modified nucleotide with phosphorothioate linkage
  modified_base 2: mod_base = OTHER; note = 2'-O-methoxyethyl 5-methylcytosine with phosphorothioate linkage
  modified_base 3: mod_base = OTHER; note = 2'-O-methoxyethyl modified nucleotide with phosphorothioate linkage
  modified_base 4: mod_base = OTHER; note = 2'-O-methoxyethyl modified nucleotide with phosphorothioate linkage
  modified_base 5: mod_base = OTHER; note = 2'-O-methoxyethyl modified nucleotide with phosphorothioate linkage
  modified_base 6: mod_base = OTHER; note = Nucleotide with phosphorothioate linkage
  modified_base 7: mod_base = OTHER; note = Nucleotide with phosphorothioate linkage
  modified_base 8: mod_base = OTHER; note = Thymine with phosphorothioate linkage
  modified_base 9: mod_base = OTHER; note = Nucleotide with phosphorothioate linkage
  modified_base 10: mod_base = OTHER; note = Nucleotide with phosphorothioate linkage
  modified_base 11: mod_base = OTHER; note = 2'-O-methyl modified abasic nucleotide with phosphorothioate linkage
  modified_base 12: mod_base = OTHER; note = Nucleotide with phosphorothioate linkage
  modified_base 13: mod_base = OTHER; note = 5-methylcytosine with phosphorothioate linkage
  modified_base 14: mod_base = OTHER; note = Nucleotide with phosphorothioate linkage
  modified_base 15: mod_base = OTHER; note = Nucleotide with phosphorothioate linkage
  modified_base 16: mod_base = OTHER; note = 2'-O-methoxyethyl modified nucleotide with phosphorothioate linkage
  modified_base 17: mod_base = OTHER; note = 2'-O-methoxyethyl modified nucleotide with phosphorothioate linkage
  modified_base 18: mod_base = OTHER; note = 2'-O-methoxyethyl modified thymine with phosphorothioate linkage
  modified_base 19: mod_base = OTHER; note = 2'-O-methoxyethyl modified nucleotide with phosphorothioate linkage
  modified_base 20: mod_base = OTHER; note = Tert-butylguanidine bridged 5-methylcytosine
  misc_feature 1..5: note = RNA
  misc_feature 6..10: note = DNA
  misc_feature 11: note = RNA
  misc_feature 12..15: note = DNA
  misc_feature 16..20: note = RNA
gcagaggtgangcgaagtgc

SEQ ID NO: 1144 - DNA, 20 bp, synthetic construct
  source 1..20: mol_type = other DNA
  modified_base 1: mod_base = OTHER; note = Tert-butylguanidine bridged nucleic acid with phosphorothioate linkage
  modified_base 2: mod_base = OTHER; note = 2'-O-methoxyethyl 5-methylcytosine with phosphorothioate linkage
  modified_base 3: mod_base = OTHER; note = 2'-O-methoxyethyl modified nucleotide with phosphorothioate linkage
  modified_base 4: mod_base = OTHER; note = 2'-O-methoxyethyl modified nucleotide with phosphorothioate linkage
  modified_base 5: mod_base = OTHER; note = 2'-O-methoxyethyl modified nucleotide with phosphorothioate linkage
  modified_base 6: mod_base = OTHER; note = Nucleotide with phosphorothioate linkage
  modified_base 7: mod_base = OTHER; note = Nucleotide with phosphorothioate linkage
  modified_base 8: mod_base = OTHER; note = Thymine with phosphorothioate linkage
  modified_base 9: mod_base = OTHER; note = Nucleotide with phosphorothioate linkage
  modified_base 10: mod_base = OTHER; note = Thymine with phosphorothioate linkage
  modified_base 11: mod_base = OTHER; note = Nucleotide with phosphorothioate linkage
  modified_base 12: mod_base = OTHER; note = Nucleotide with phosphorothioate linkage
  modified_base 13: mod_base = OTHER; note = 5-methylcytosine with phosphorothioate linkage
  modified_base 14: mod_base = OTHER; note = Nucleotide with phosphorothioate linkage
  modified_base 15: mod_base = OTHER; note = Nucleotide with phosphorothioate linkage
  modified_base 16: mod_base = OTHER; note = 2'-O-methoxyethyl modified nucleotide with phosphorothioate linkage
  modified_base 17: mod_base = OTHER; note = 2'-O-methoxyethyl modified nucleotide with phosphorothioate linkage
  modified_base 18: mod_base = OTHER; note = 2'-O-methoxyethyl modified thymine with phosphorothioate linkage
  modified_base 19: mod_base = OTHER; note = 2'-O-methoxyethyl modified nucleotide with phosphorothioate linkage
  modified_base 20: mod_base = OTHER; note = 2'-O-methoxyethyl 5-methylcytosine
  misc_feature 1..5: note = RNA
  misc_feature 6..15: note = DNA
  misc_feature 16..20: note = RNA
gcagaggtgtagcgaagtgc

SEQ ID NO: 1145 - DNA, 20 bp, synthetic construct
  source 1..20: mol_type = other DNA
  modified_base 1: mod_base = OTHER; note = 2'-O-methoxyethyl modified nucleotide with phosphorothioate linkage
  modified_base 2: mod_base = OTHER; note = Tert-butylguanidine bridged 5-methylcytosine with phosphorothioate linkage
  modified_base 3: mod_base = OTHER; note = 2'-O-methoxyethyl modified nucleotide with phosphorothioate linkage
  modified_base 4: mod_base = OTHER; note = 2'-O-methoxyethyl modified nucleotide with phosphorothioate linkage
  modified_base 5: mod_base = OTHER; note = 2'-O-methoxyethyl modified nucleotide with phosphorothioate linkage
  modified_base 6: mod_base = OTHER; note = Nucleotide with phosphorothioate linkage
  modified_base 7: mod_base = OTHER; note = Nucleotide with phosphorothioate linkage
  modified_base 8: mod_base = OTHER; note = Thymine with phosphorothioate linkage
  modified_base 9: mod_base = OTHER; note = Nucleotide with phosphorothioate linkage
  modified_base 10: mod_base = OTHER; note = Thymine with phosphorothioate linkage
  modified_base 11: mod_base = OTHER; note = Nucleotide with phosphorothioate linkage
  modified_base 12: mod_base = OTHER; note = Nucleotide with phosphorothioate linkage
  modified_base 13: mod_base = OTHER; note = 5-methylcytosine with phosphorothioate linkage
  modified_base 14: mod_base = OTHER; note = Nucleotide with phosphorothioate linkage
  modified_base 15: mod_base = OTHER; note = Nucleotide with phosphorothioate linkage
  modified_base 16: mod_base = OTHER; note = 2'-O-methoxyethyl modified nucleotide with phosphorothioate linkage
  modified_base 17: mod_base = OTHER; note = 2'-O-methoxyethyl modified nucleotide with phosphorothioate linkage
  modified_base 18: mod_base = OTHER; note = 2'-O-methoxyethyl modified thymine with phosphorothioate linkage
  modified_base 19: mod_base = OTHER; note = 2'-O-methoxyethyl modified nucleotide with phosphorothioate linkage
  modified_base 20: mod_base = OTHER; note = 2'-O-methoxyethyl 5-methylcytosine
  misc_feature 1..5: note = RNA
  misc_feature 6..15: note = DNA
  misc_feature 16..20: note = RNA
gcagaggtgtagcgaagtgc

SEQ ID NO: 1146 - DNA, 20 bp, synthetic construct
  source 1..20: mol_type = other DNA
  modified_base 1: mod_base = OTHER; note = 2'-O-methoxyethyl modified nucleotide with phosphorothioate linkage
  modified_base 2: mod_base = OTHER; note = 2'-O-methoxyethyl 5-methylcytosine with phosphorothioate linkage
  modified_base 3: mod_base = OTHER; note = Tert-butylguanidine bridged nucleotide with phosphorothioate linkage
  modified_base 4: mod_base = OTHER; note = 2'-O-methoxyethyl modified nucleotide with phosphorothioate linkage
  modified_base 5: mod_base = OTHER; note = 2'-O-methoxyethyl modified nucleotide with phosphorothioate linkage
  modified_base 6: mod_base = OTHER; note = Nucleotide with phosphorothioate linkage
  modified_base 7: mod_base = OTHER; note = Nucleotide with phosphorothioate linkage
  modified_base 8: mod_base = OTHER; note = Thymine with phosphorothioate linkage
  modified_base 9: mod_base = OTHER; note = Nucleotide with phosphorothioate linkage
  modified_base 10: mod_base = OTHER; note = Thymine with phosphorothioate linkage
  modified_base 11: mod_base = OTHER; note = Nucleotide with phosphorothioate linkage
  modified_base 12: mod_base = OTHER; note = Nucleotide with phosphorothioate linkage
  modified_base 13: mod_base = OTHER; note = 5-methylcytosine with phosphorothioate linkage
  modified_base 14: mod_base = OTHER; note = Nucleotide with phosphorothioate linkage
  modified_base 15: mod_base = OTHER; note = Nucleotide with phosphorothioate linkage
  modified_base 16: mod_base = OTHER; note = 2'-O-methoxyethyl modified nucleotide with phosphorothioate linkage
  modified_base 17: mod_base = OTHER; note = 2'-O-methoxyethyl modified nucleotide with phosphorothioate linkage
  modified_base 18: mod_base = OTHER; note = 2'-O-methoxyethyl modified thymine with phosphorothioate linkage
  modified_base 19: mod_base = OTHER; note = 2'-O-methoxyethyl modified nucleotide with phosphorothioate linkage
  modified_base 20: mod_base = OTHER; note = 2'-O-methoxyethyl 5-methylcytosine
  misc_feature 1..5: note = RNA
  misc_feature 6..15: note = DNA
  misc_feature 16..20: note = RNA
gcagaggtgtagcgaagtgc

SEQ ID NO: 1147 - DNA, 20 bp, synthetic construct
  source 1..20: mol_type = other DNA
  modified_base 1: mod_base = OTHER; note = 2'-O-methoxyethyl modified nucleotide with phosphorothioate linkage
  modified_base 2: mod_base = OTHER; note = 2'-O-methoxyethyl 5-methylcytosine with phosphorothioate linkage
  modified_base 3: mod_base = OTHER; note = 2'-O-methoxyethyl modified nucleotide with phosphorothioate linkage
  modified_base 4: mod_base = OTHER; note = Tert-butylguanidine bridged nucleic acid with phosphorothioate linkage
  modified_base 5: mod_base = OTHER; note = 2'-O-methoxyethyl modified nucleotide with phosphorothioate linkage
  modified_base 6: mod_base = OTHER; note = Nucleotide with phosphorothioate linkage
  modified_base 7: mod_base = OTHER; note = Nucleotide with phosphorothioate linkage
  modified_base 8: mod_base = OTHER; note = Thymine with phosphorothioate linkage
  modified_base 9: mod_base = OTHER; note = Nucleotide with phosphorothioate linkage
  modified_base 10: mod_base = OTHER; note = Thymine with phosphorothioate linkage
  modified_base 11: mod_base = OTHER; note = Nucleotide with phosphorothioate linkage
  modified_base 12: mod_base = OTHER; note = Nucleotide with phosphorothioate linkage
  modified_base 13: mod_base = OTHER; note = 5-methylcytosine with phosphorothioate linkage
  modified_base 14: mod_base = OTHER; note = Nucleotide with phosphorothioate linkage
  modified_base 15: mod_base = OTHER; note = Nucleotide with phosphorothioate linkage
  modified_base 16: mod_base = OTHER; note = 2'-O-methoxyethyl modified nucleotide with phosphorothioate linkage
  modified_base 17: mod_base = OTHER; note = 2'-O-methoxyethyl modified nucleotide with phosphorothioate linkage
  modified_base 18: mod_base = OTHER; note = 2'-O-methoxyethyl modified thymine with phosphorothioate linkage
  modified_base 19: mod_base = OTHER; note = 2'-O-methoxyethyl modified nucleotide with phosphorothioate linkage
  modified_base 20: mod_base = OTHER; note = 2'-O-methoxyethyl 5-methylcytosine
  misc_feature 1..5: note = RNA
  misc_feature 6..15: note = DNA
  misc_feature 16..20: note = RNA
gcagaggtgtagcgaagtgc

SEQ ID NO: 1148 - DNA, 20 bp, synthetic construct
  source 1..20: mol_type = other DNA
  modified_base 1: mod_base = OTHER; note = 2'-O-methoxyethyl modified nucleotide with phosphorothioate linkage
  modified_base 2: mod_base = OTHER; note = 2'-O-methoxyethyl 5-methylcytosine with phosphorothioate linkage
  modified_base 3: mod_base = OTHER; note = 2'-O-methoxyethyl modified nucleotide with phosphorothioate linkage
  modified_base 4: mod_base = OTHER; note = 2'-O-methoxyethyl modified nucleotide with phosphorothioate linkage
  modified_base 5: mod_base = OTHER; note = Tert-butylguanidine bridged nucleotide with phosphorothioate linkage
  modified_base 6: mod_base = OTHER; note = Nucleotide with phosphorothioate linkage
  modified_base 7: mod_base = OTHER; note = Nucleotide with phosphorothioate linkage
  modified_base 8: mod_base = OTHER; note = Thymine with phosphorothioate linkage
  modified_base 9: mod_base = OTHER; note = Nucleotide with phosphorothioate linkage
  modified_base 10: mod_base = OTHER; note = Thymine with phosphorothioate linkage
  modified_base 11: mod_base = OTHER; note = Nucleotide with phosphorothioate linkage
  modified_base 12: mod_base = OTHER; note = Nucleotide with phosphorothioate linkage
  modified_base 13: mod_base = OTHER; note = 5-methylcytosine with phosphorothioate linkage
  modified_base 14: mod_base = OTHER; note = Nucleotide with phosphorothioate linkage
  modified_base 15: mod_base = OTHER; note = Nucleotide with phosphorothioate linkage
  modified_base 16: mod_base = OTHER; note = 2'-O-methoxyethyl modified nucleotide with phosphorothioate linkage
  modified_base 17: mod_base = OTHER; note = 2'-O-methoxyethyl modified nucleotide with phosphorothioate linkage
  modified_base 18: mod_base = OTHER; note = 2'-O-methoxyethyl modified thymine with phosphorothioate linkage
  modified_base 19: mod_base = OTHER; note = 2'-O-methoxyethyl modified nucleotide with phosphorothioate linkage
  modified_base 20: mod_base = OTHER; note = 2'-O-methoxyethyl 5-methylcytosine
  misc_feature 1..5: note = RNA
  misc_feature 6..15: note = DNA
  misc_feature 16..20: note = RNA
gcagaggtgtagcgaagtgc

SEQ ID NO: 1149 - DNA, 20 bp, synthetic construct
  source 1..20: mol_type = other DNA
  modified_base 1: mod_base = OTHER; note = 2'-O-methoxyethyl modified nucleotide with phosphorothioate linkage
  modified_base 2: mod_base = OTHER; note = 2'-O-methoxyethyl 5-methylcytosine with phosphorothioate linkage
  modified_base 3: mod_base = OTHER; note = 2'-O-methoxyethyl modified nucleotide with phosphorothioate linkage
  modified_base 4: mod_base = OTHER; note = 2'-O-methoxyethyl modified nucleotide with phosphorothioate linkage
  modified_base 5: mod_base = OTHER; note = 2'-O-methoxyethyl modified nucleotide with phosphorothioate linkage
  modified_base 6: mod_base = OTHER; note = Nucleotide with phosphorothioate linkage
  modified_base 7: mod_base = OTHER; note = Nucleotide with phosphorothioate linkage
  modified_base 8: mod_base = OTHER; note = Thymine with phosphorothioate linkage
  modified_base 9: mod_base = OTHER; note = Nucleotide with phosphorothioate linkage
  modified_base 10: mod_base = OTHER; note = Thymine with phosphorothioate linkage
  modified_base 11: mod_base = OTHER; note = Nucleotide with phosphorothioate linkage
  modified_base 12: mod_base = OTHER; note = Nucleotide with phosphorothioate linkage
  modified_base 13: mod_base = OTHER; note = 5-methylcytosine with phosphorothioate linkage
  modified_base 14: mod_base = OTHER; note = Nucleotide with phosphorothioate linkage
  modified_base 15: mod_base = OTHER; note = Nucleotide with phosphorothioate linkage
  modified_base 16: mod_base = OTHER; note = Tert-butylguanidine bridged nucleotide with phosphorothioate linkage
  modified_base 17: mod_base = OTHER; note = 2'-O-methoxyethyl modified nucleotide with phosphorothioate linkage
  modified_base 18: mod_base = OTHER; note = 2'-O-methoxyethyl modified thymine with phosphorothioate linkage
  modified_base 19: mod_base = OTHER; note = 2'-O-methoxyethyl modified nucleotide with phosphorothioate linkage
  modified_base 20: mod_base = OTHER; note = 2'-O-methoxyethyl 5-methylcytosine
  misc_feature 1..5: note = RNA
  misc_feature 6..15: note = DNA
  misc_feature 16..20: note = RNA
gcagaggtgtagcgaagtgc

SEQ ID NO: 1150 - DNA, 20 bp, synthetic construct
  source 1..20: mol_type = other DNA
  modified_base 1: mod_base = OTHER; note = 2'-O-methoxyethyl modified nucleotide with phosphorothioate linkage
  modified_base 2: mod_base = OTHER; note = 2'-O-methoxyethyl 5-methylcytosine with phosphorothioate linkage
  modified_base 3: mod_base = OTHER; note = 2'-O-methoxyethyl modified nucleotide with phosphorothioate linkage
  modified_base 4: mod_base = OTHER; note = 2'-O-methoxyethyl modified nucleotide with phosphorothioate linkage
  modified_base 5: mod_base = OTHER; note = 2'-O-methoxyethyl modified nucleotide with phosphorothioate linkage
  modified_base 6: mod_base = OTHER; note = Nucleotide with phosphorothioate linkage
  modified_base 7: mod_base = OTHER; note = Nucleotide with phosphorothioate linkage
  modified_base 8: mod_base = OTHER; note = Thymine with phosphorothioate linkage
  modified_base 9: mod_base = OTHER; note = Nucleotide with phosphorothioate linkage
  modified_base 10: mod_base = OTHER; note = Thymine with phosphorothioate linkage
  modified_base 11: mod_base = OTHER; note = Nucleotide with phosphorothioate linkage
  modified_base 12: mod_base = OTHER; note = Nucleotide with phosphorothioate linkage
  modified_base 13: mod_base = OTHER; note = 5-methylcytosine with phosphorothioate linkage
  modified_base 14: mod_base = OTHER; note = Nucleotide with phosphorothioate linkage
  modified_base 15: mod_base = OTHER; note = Nucleotide with phosphorothioate linkage
  modified_base 16: mod_base = OTHER; note = 2'-O-methoxyethyl modified nucleotide with phosphorothioate linkage
  modified_base 17: mod_base = OTHER; note = Tert-butylguanidine bridged nucleic acid with phosphorothioate linkage
  modified_base 18: mod_base = OTHER; note = 2'-O-methoxyethyl modified thymine with phosphorothioate linkage
  modified_base 19: mod_base = OTHER; note = 2'-O-methoxyethyl modified nucleotide with phosphorothioate linkage
  modified_base 20: mod_base = OTHER; note = 2'-O-methoxyethyl 5-methylcytosine
  misc_feature 1..5: note = RNA
  misc_feature 6..15: note = DNA
  misc_feature 16..20: note = RNA
gcagaggtgtagcgaagtgc

SEQ ID NO: 1151 - DNA, 20 bp, synthetic construct
  source 1..20: mol_type = other DNA
  modified_base 1: mod_base = OTHER; note = 2'-O-methoxyethyl modified nucleotide with phosphorothioate linkage
  modified_base 2: mod_base = OTHER; note = 2'-O-methoxyethyl 5-methylcytosine with phosphorothioate linkage
  modified_base 3: mod_base = OTHER; note = 2'-O-methoxyethyl modified nucleotide with phosphorothioate linkage
  modified_base 4: mod_base = OTHER; note = 2'-O-methoxyethyl modified nucleotide with phosphorothioate linkage
  modified_base 5: mod_base = OTHER; note = 2'-O-methoxyethyl modified nucleotide with phosphorothioate linkage
  modified_base 6: mod_base = OTHER; note = Nucleotide with phosphorothioate linkage
  modified_base 7: mod_base = OTHER; note = Nucleotide with phosphorothioate linkage
  modified_base 8: mod_base = OTHER; note = Thymine with phosphorothioate linkage
  modified_base 9: mod_base = OTHER; note = Nucleotide with phosphorothioate linkage
  modified_base 10: mod_base = OTHER; note = Thymine with phosphorothioate linkage
  modified_base 11: mod_base = OTHER; note = Nucleotide with phosphorothioate linkage
  modified_base 12: mod_base = OTHER; note = Nucleotide with phosphorothioate linkage
  modified_base 13: mod_base = OTHER; note = 5-methylcytosine with phosphorothioate linkage
  modified_base 14: mod_base = OTHER; note = Nucleotide with phosphorothioate linkage
  modified_base 15: mod_base = OTHER; note = Nucleotide with phosphorothioate linkage
  modified_base 16: mod_base = OTHER; note = 2'-O-methoxyethyl modified nucleotide with phosphorothioate linkage
  modified_base 17: mod_base = OTHER; note = 2'-O-methoxyethyl modified nucleotide with phosphorothioate linkage
  modified_base 18: mod_base = OTHER; note = Tert-butylguanidine bridged thymine with phosphorothioate linkage
  modified_base 19: mod_base = OTHER; note = 2'-O-methoxyethyl modified nucleotide with phosphorothioate linkage
  modified_base 20: mod_base = OTHER; note = 2'-O-methoxyethyl 5-methylcytosine
  misc_feature 1..5: note = RNA
  misc_feature 6..15: note = DNA
  misc_feature 16..20: note = RNA
gcagaggtgtagcgaagtgc

SEQ ID NO: 1152 - DNA, 20 bp, synthetic construct
  source 1..20: mol_type = other DNA
  modified_base 1: mod_base = OTHER; note = 2'-O-methoxyethyl modified nucleotide with phosphorothioate linkage
  modified_base 2: mod_base = OTHER; note = 2'-O-methoxyethyl 5-methylcytosine with phosphorothioate linkage
  modified_base 3: mod_base = OTHER; note = 2'-O-methoxyethyl modified nucleotide with phosphorothioate linkage
  modified_base 4: mod_base = OTHER; note = 2'-O-methoxyethyl modified nucleotide with phosphorothioate linkage
  modified_base 5: mod_base = OTHER; note = 2'-O-methoxyethyl modified nucleotide with phosphorothioate linkage
  modified_base 6: mod_base = OTHER; note = Nucleotide with phosphorothioate linkage
  modified_base 7: mod_base = OTHER; note = Nucleotide with phosphorothioate linkage
  modified_base 8: mod_base = OTHER; note = Thymine with phosphorothioate linkage
  modified_base 9: mod_base = OTHER; note = Nucleotide with phosphorothioate linkage
  modified_base 10: mod_base = OTHER; note = Thymine with phosphorothioate linkage
  modified_base 11: mod_base = OTHER; note = Nucleotide with phosphorothioate linkage
  modified_base 12: mod_base = OTHER; note = Nucleotide with phosphorothioate linkage
  modified_base 13: mod_base = OTHER; note = 5-methylcytosine with phosphorothioate linkage
  modified_base 14: mod_base = OTHER; note = Nucleotide with phosphorothioate linkage
  modified_base 15: mod_base = OTHER; note = Nucleotide with phosphorothioate linkage
  modified_base 16: mod_base = OTHER; note = 2'-O-methoxyethyl modified nucleotide with phosphorothioate linkage
  modified_base 17: mod_base = OTHER; note = 2'-O-methoxyethyl modified nucleotide with phosphorothioate linkage
  modified_base 18: mod_base = OTHER; note = 2'-O-methoxyethyl modified thymine with phosphorothioate linkage
  modified_base 19: mod_base = OTHER; note = Tert-butylguanidine bridged nucleic acid with phosphorothioate linkage
  modified_base 20: mod_base = OTHER; note = 2'-O-methoxyethyl 5-methylcytosine
  misc_feature 1..5: note = RNA
  misc_feature 6..15: note = DNA
  misc_feature 16..20: note = RNA
gcagaggtgtagcgaagtgc

SEQ ID NO: 1153 - DNA, 20 bp, synthetic construct
  source 1..20: mol_type = other DNA
  modified_base 1: mod_base = OTHER; note = 2'-O-methoxyethyl modified nucleotide with phosphorothioate linkage
  modified_base 2: mod_base = OTHER; note = 2'-O-methoxyethyl 5-methylcytosine with phosphorothioate linkage
  modified_base 3: mod_base = OTHER; note = 2'-O-methoxyethyl modified nucleotide with phosphorothioate linkage
  modified_base 4: mod_base = OTHER; note = 2'-O-methoxyethyl modified nucleotide with phosphorothioate linkage
  modified_base 5: mod_base = OTHER; note = 2'-O-methoxyethyl modified nucleotide with phosphorothioate linkage
  modified_base 6: mod_base = OTHER; note = Nucleotide with phosphorothioate linkage
  modified_base 7: mod_base = OTHER; note = Nucleotide with phosphorothioate linkage
  modified_base 8: mod_base = OTHER; note = Thymine with phosphorothioate linkage
  modified_base 9: mod_base = OTHER; note = Nucleotide with phosphorothioate linkage
  modified_base 10: mod_base = OTHER; note = Thymine with phosphorothioate linkage
  modified_base 11: mod_base = OTHER; note = Nucleotide with phosphorothioate linkage
  modified_base 12: mod_base = OTHER; note = Nucleotide with phosphorothioate linkage
  modified_base 13: mod_base = OTHER; note = 5-methylcytosine with phosphorothioate linkage
  modified_base 14: mod_base = OTHER; note = Nucleotide with phosphorothioate linkage
  modified_base 15: mod_base = OTHER; note = Nucleotide with phosphorothioate linkage
  modified_base 16: mod_base = OTHER; note = 2'-O-methoxyethyl modified nucleotide with phosphorothioate linkage
  modified_base 17: mod_base = OTHER; note = 2'-O-methoxyethyl modified nucleotide with phosphorothioate linkage
  modified_base 18: mod_base = OTHER; note = 2'-O-methoxyethyl modified thymine with phosphorothioate linkage
  modified_base 19: mod_base = OTHER; note = 2'-O-methoxyethyl modified nucleotide with phosphorothioate linkage
  modified_base 20: mod_base = OTHER; note = Tert-butylguanidine bridged 5-methylcytosine
  misc_feature 1..5: note = RNA
  misc_feature 6..15: note = DNA
  misc_feature 16..20: note = RNA
gcagaggtgtagcgaagtgc

SEQ ID NO: 1154 - DNA, 20 bp, synthetic construct
  source 1..20: mol_type = other DNA
  modified_base 1: mod_base = OTHER; note = 2'-O-methoxyethyl modified nucleotide with phosphorothioate linkage
  modified_base 2: mod_base = OTHER; note = 2'-O-methoxyethyl 5-methylcytosine with phosphorothioate linkage
  modified_base 3: mod_base = OTHER; note = 2'-O-methoxyethyl modified nucleotide with phosphorothioate linkage
  modified_base 4: mod_base = OTHER; note = 2'-O-methoxyethyl modified nucleotide with phosphorothioate linkage
  modified_base 5: mod_base = OTHER; note = Locked nucleic acid with phosphorothioate linkage
  modified_base 6: mod_base = OTHER; note = Nucleotide with phosphorothioate linkage
  modified_base 7: mod_base = OTHER; note = Nucleotide with phosphorothioate linkage
  modified_base 8: mod_base = OTHER; note = Thymine with phosphorothioate linkage
  modified_base 9: mod_base = OTHER; note = Nucleotide with phosphorothioate linkage
  modified_base 10: mod_base = OTHER; note = Nucleotide with phosphorothioate linkage
  modified_base 11: mod_base = OTHER; note = 2'-O-methyl modified abasic nucleotide with phosphorothioate linkage
  modified_base 12: mod_base = OTHER; note = Nucleotide with phosphorothioate linkage
  modified_base 13: mod_base = OTHER; note = 5-methylcytosine with phosphorothioate linkage
  modified_base 14: mod_base = OTHER; note = Nucleotide with phosphorothioate linkage
  modified_base 15: mod_base = OTHER; note = Nucleotide with phosphorothioate linkage
  modified_base 16: mod_base = OTHER; note = Locked nucleic acid with phosphorothioate linkage
  modified_base 17: mod_base = OTHER; note = 2'-O-methoxyethyl modified nucleotide with phosphorothioate linkage
  modified_base 18: mod_base = OTHER; note = 2'-O-methoxyethyl modified thymine with phosphorothioate linkage
  modified_base 19: mod_base = OTHER; note = 2'-O-methoxyethyl modified nucleotide with phosphorothioate linkage
  modified_base 20: mod_base = OTHER; note = 2'-O-methoxyethyl 5-methylcytosine
  misc_feature 1..5: note = RNA
  misc_feature 6..10: note = DNA
  misc_feature 11: note = RNA
  misc_feature 12..15: note = DNA
  misc_feature 16..20: note = RNA
gcagaggtgangcgaagtgc

SEQ ID NO: 1155 - DNA, 20 bp, synthetic construct
  source 1..20: mol_type = other DNA
  modified_base 1: mod_base = OTHER; note = 2'-O-methoxyethyl modified nucleotide with phosphorothioate linkage
  modified_base 2: mod_base = OTHER; note = 2'-O-methoxyethyl 5-methylcytosine with phosphorothioate linkage
  modified_base 3: mod_base = OTHER; note = 2'-O-methoxyethyl modified nucleotide with phosphorothioate linkage
  modified_base 4: mod_base = OTHER; note = 2'-O-methoxyethyl modified nucleotide with phosphorothioate linkage
  modified_base 5: mod_base = OTHER; note = 2'-O-methoxyethyl modified nucleotide with phosphorothioate linkage
  modified_base 6: mod_base = OTHER; note = Nucleotide with phosphorothioate linkage
  modified_base 7: mod_base = OTHER; note = Nucleotide with phosphorothioate linkage
  modified_base 8: mod_base = OTHER; note = Thymine with phosphorothioate linkage
  modified_base 9: mod_base = OTHER; note = Nucleotide with phosphorothioate linkage
  modified_base 10: mod_base = OTHER; note = Nucleotide with phosphorothioate linkage
  modified_base 11: mod_base = OTHER; note = 2'-O-methyl modified abasic nucleotide with phosphorothioate linkage
  modified_base 12: mod_base = OTHER; note = Nucleotide with phosphorothioate linkage
  modified_base 13: mod_base = OTHER; note = 5-methylcytosine with phosphorothioate linkage
  modified_base 14: mod_base = OTHER; note = Nucleotide with phosphorothioate linkage
  modified_base 15: mod_base = OTHER; note = Nucleotide with phosphorothioate linkage
  modified_base 16: mod_base = OTHER; note = Locked nucleic acid with phosphorothioate linkage
  modified_base 17: mod_base = OTHER; note = 2'-O-methoxyethyl modified nucleotide with phosphorothioate linkage
  modified_base 18: mod_base = OTHER; note = Locked thymine with phosphorothioate linkage
  modified_base 19: mod_base = OTHER; note = 2'-O-methoxyethyl modified nucleotide with phosphorothioate linkage
  modified_base 20: mod_base = OTHER; note = 2'-O-methoxyethyl 5-methylcytosine
  misc_feature 1..5: note = RNA
  misc_feature 6..10: note = DNA
  misc_feature 11: note = RNA
  misc_feature 12..15: note = DNA
  misc_feature 16..20: note = RNA
gcagaggtgangcgaagtgc

SEQ ID NO: 1156 - DNA, 20 bp, synthetic construct
  source 1..20: mol_type = other DNA
  modified_base 1: mod_base = OTHER; note = 2'-O-methoxyethyl 5-methylcytosine with phosphorothioate linkage
  modified_base 2: mod_base = OTHER; note = 2'-O-methoxyethyl modified nucleotide with phosphorothioate linkage
  modified_base 3: mod_base = OTHER; note = 2'-O-methyl modified nucleotide with phosphorothioate linkage
  modified_base 4: mod_base = OTHER; note = 2'-O-methoxyethyl modified nucleotide with phosphorothioate linkage
  modified_base 5: mod_base = OTHER; note = 2'-O-methyl modified nucleotide with phosphorothioate linkage
  modified_base 6: mod_base = OTHER; note = Nucleotide with phosphorothioate linkage
  modified_base 7: mod_base = OTHER; note = Thymine with phosphorothioate linkage
  modified_base 8: mod_base = OTHER; note = Nucleotide with phosphorothioate linkage
  modified_base 9: mod_base = OTHER; note = Nucleotide with phosphorothioate linkage
  modified_base 10: mod_base = OTHER; note = Nucleotide with phosphorothioate linkage
  modified_base 11: mod_base = OTHER; note = Nucleotide with phosphorothioate linkage
  modified_base 12: mod_base = OTHER; note = 5-methylcytosine with phosphorothioate linkage
  modified_base 13: mod_base = OTHER; note = Nucleotide with phosphorothioate linkage
  modified_base 14: mod_base = OTHER; note = Nucleotide with phosphorothioate linkage
  modified_base 15: mod_base = OTHER; note = Nucleotide with phosphorothioate linkage
  modified_base 16: mod_base = OTHER; note = 2'-O-methoxyethyl modified nucleotide with phosphorothioate linkage
  modified_base 17: mod_base = OTHER; note = 2'-O-methoxyethyl modified thymine with phosphorothioate linkage
  modified_base 18: mod_base = OTHER; note = Tert-butylguanidine bridged nucleic acid with phosphorothioate linkage
  modified_base 19: mod_base = OTHER; note = 2'-O-methoxyethyl 5-methylcytosine with phosphorothioate linkage
  modified_base 20: mod_base = OTHER; note = 2'-O-methoxyethyl modified nucleotide
  misc_feature 1..5: note = RNA
  misc_feature 6..15: note = DNA
  misc_feature 16..20: note = RNA
cagaggtgaagcgaagtgca

SEQ ID NO: 1157 - DNA, 20 bp, synthetic construct
  source 1..20: mol_type = other DNA
  modified_base 1: mod_base = OTHER; note = 2'-O-methoxyethyl 5-methylcytosine with phosphorothioate linkage
  modified_base 2: mod_base = OTHER; note = 2'-O-methoxyethyl modified nucleotide with phosphorothioate linkage
  modified_base 3: mod_base = OTHER; note = 2'-O-methoxyethyl modified nucleotide with phosphorothioate linkage
  modified_base 4: mod_base = OTHER; note = 2'-O-methoxyethyl modified nucleotide with phosphorothioate linkage
  modified_base 5: mod_base = OTHER; note = 2'-O-methoxyethyl modified nucleotide with phosphorothioate linkage
  modified_base 6: mod_base = OTHER; note = Nucleotide with phosphorothioate linkage
  modified_base 7: mod_base = OTHER; note = Thymine with phosphorothioate linkage
  modified_base 8: mod_base = OTHER; note = Nucleotide with phosphorothioate linkage
  modified_base 9: mod_base = OTHER; note = Nucleotide with phosphorothioate linkage
  modified_base 10: mod_base = OTHER; note = Nucleotide with phosphorothioate linkage
  modified_base 11: mod_base = OTHER; note = Nucleotide with phosphorothioate linkage
  modified_base 12: mod_base = OTHER; note = 5-methylcytosine with phosphorothioate linkage
  modified_base 13: mod_base = OTHER; note = Nucleotide with phosphorothioate linkage
  modified_base 14: mod_base = OTHER; note = Nucleotide with phosphorothioate linkage
  modified_base 15: mod_base = OTHER; note = Nucleotide with phosphorothioate linkage
  modified_base 16: mod_base = OTHER; note = 2'-O-methoxyethyl modified nucleotide with phosphorothioate linkage
  modified_base 17: mod_base = OTHER; note = 2'-O-methoxyethyl modified thymine with phosphorothioate linkage
  modified_base 18: mod_base = OTHER; note = Tert-butylguanidine bridged nucleic acid with phosphorothioate linkage
  modified_base 19: mod_base = OTHER; note = 2'-O-methyl 5-methylcytosine with phosphorothioate linkage
  modified_base 20: mod_base = OTHER; note = 2'-O-methyl modified nucleotide
  misc_feature 1..5: note = RNA
  misc_feature 6..15: note = DNA
  misc_feature 16..20: note = RNA
cagaggtgaagcgaagtgca

SEQ ID NO: 1158 - DNA, 20 bp, synthetic construct
  source 1..20: mol_type = other DNA
  modified_base 1: mod_base = OTHER; note = 2'-O-methoxyethyl 5-methylcytosine with phosphorothioate linkage
  modified_base 2: mod_base = OTHER; note = 2'-O-methoxyethyl modified nucleotide with phosphorothioate linkage
  modified_base 3: mod_base = OTHER; note = 2'-O-methoxyethyl modified nucleotide with phosphorothioate linkage
  modified_base 4: mod_base = OTHER; note = 2'-O-methoxyethyl modified nucleotide with phosphorothioate linkage
  modified_base 5: mod_base = OTHER; note = 2'-O-methoxyethyl modified nucleotide with phosphorothioate linkage
  modified_base 6: mod_base = OTHER; note = Nucleotide with phosphorothioate linkage
  modified_base 7: mod_base = OTHER; note = Thymine with phosphorothioate linkage
  modified_base 8: mod_base = OTHER; note = Nucleotide with phosphorothioate linkage
  modified_base 9: mod_base = OTHER; note = Nucleotide with phosphorothioate linkage
  modified_base 10: mod_base = OTHER; note = Nucleotide with phosphorothioate linkage
  modified_base 11: mod_base = OTHER; note = Nucleotide with phosphorothioate linkage
  modified_base 12: mod_base = OTHER; note = 5-methylcytosine with phosphorothioate linkage
  modified_base 13: mod_base = OTHER; note = Nucleotide with phosphorothioate linkage
  modified_base 14: mod_base = OTHER; note = Nucleotide with phosphorothioate linkage
  modified_base 15: mod_base = OTHER; note = Nucleotide with phosphorothioate linkage
  modified_base 16: mod_base = OTHER; note = 2'-O-methyl modified nucleotide with phosphorothioate linkage
  modified_base 17: mod_base = OTHER; note = 2'-O-methoxyethyl modified thymine with phosphorothioate linkage
  modified_base 18: mod_base = OTHER; note = Tert-butylguanidine bridged nucleic acid with phosphorothioate linkage
  modified_base 19: mod_base = OTHER; note = 2'-O-methoxyethyl 5-methylcytosine with phosphorothioate linkage
  modified_base 20: mod_base = OTHER; note = 2'-O-methyl modified nucleotide
  misc_feature 1..5: note = RNA
  misc_feature 6..15: note = DNA
  misc_feature 16..20: note = RNA
cagaggtgaagcgaagtgca

SEQ ID NO: 1159 - DNA, 20 bp, synthetic construct
  source 1..20: mol_type = other DNA
  modified_base 1: mod_base = OTHER; note = 2'-O-methoxyethyl 5-methylcytosine with phosphorothioate linkage
  modified_base 2: mod_base = OTHER; note = 2'-O-methoxyethyl modified nucleotide with phosphorothioate linkage
  modified_base 3: mod_base = OTHER; note = 2'-O-methoxyethyl modified nucleotide with phosphorothioate linkage
  modified_base 4: mod_base = OTHER; note = 2'-O-methoxyethyl modified nucleotide with phosphorothioate linkage
  modified_base 5: mod_base = OTHER; note = 2'-O-methoxyethyl modified nucleotide with phosphorothioate linkage
  modified_base 6: mod_base = OTHER; note = Nucleotide with phosphorothioate linkage
  modified_base 7: mod_base = OTHER; note = Thymine with phosphorothioate linkage
  modified_base 8: mod_base = OTHER; note = Nucleotide with phosphorothioate linkage
  modified_base 9: mod_base = OTHER; note = Nucleotide with phosphorothioate linkage
  modified_base 10: mod_base = OTHER; note = Nucleotide with phosphorothioate linkage
  modified_base 11: mod_base = OTHER; note = Nucleotide with phosphorothioate linkage
  modified_base 12: mod_base = OTHER; note = 5-methylcytosine with phosphorothioate linkage
  modified_base 13: mod_base = OTHER; note = Nucleotide with phosphorothioate linkage
  modified_base 14: mod_base = OTHER; note = Nucleotide with phosphorothioate linkage
  modified_base 15: mod_base = OTHER; note = Nucleotide with phosphorothioate linkage
  modified_base 16: mod_base = OTHER; note = Locked nucleic acid with phosphorothioate linkage
  modified_base 17: mod_base = OTHER; note = 2'-O-methoxyethyl modified thymine with phosphorothioate linkage
  modified_base 18: mod_base = OTHER; note = Tert-butylguanidine bridged nucleic acid with phosphorothioate linkage
  modified_base 19: mod_base = OTHER; note = 2'-O-methoxyethyl 5-methylcytosine with phosphorothioate linkage
  modified_base 20: mod_base = OTHER; note = 2'-O-methoxyethyl modified nucleotide
  misc_feature 1..5: note = RNA
  misc_feature 6..15: note = DNA
  misc_feature 16..20: note = RNA
cagaggtgaagcgaagtgca

SEQ ID NO: 1160 - DNA, 20 bp, synthetic construct
  source 1..20: mol_type = other DNA
  modified_base 1: mod_base = OTHER; note = 2'-O-methoxyethyl 5-methylcytosine with phosphorothioate linkage
  modified_base 2: mod_base = OTHER; note = 2'-O-methoxyethyl modified nucleotide with phosphorothioate linkage
  modified_base 3: mod_base = OTHER; note = 2'-O-methoxyethyl modified nucleotide with phosphorothioate linkage
  modified_base 4: mod_base = OTHER; note = 2'-O-methoxyethyl modified nucleotide with phosphorothioate linkage
  modified_base 5: mod_base = OTHER; note = 2'-O-methoxyethyl modified nucleotide with phosphorothioate linkage
  modified_base 6: mod_base = OTHER; note = Nucleotide with phosphorothioate linkage
  modified_base 7: mod_base = OTHER; note = Thymine with phosphorothioate linkage
  modified_base 8: mod_base = OTHER; note = Nucleotide with phosphorothioate linkage
  modified_base 9: mod_base = OTHER; note = Nucleotide with phosphorothioate linkage
  modified_base 10: mod_base = OTHER; note = Nucleotide with phosphorothioate linkage
  modified_base 11: mod_base = OTHER; note = Nucleotide with phosphorothioate linkage
  modified_base 12: mod_base = OTHER; note = 5-methylcytosine with phosphorothioate linkage
  modified_base 13: mod_base = OTHER; note = Nucleotide with phosphorothioate linkage
  modified_base 14: mod_base = OTHER; note = Nucleotide with phosphorothioate linkage
  modified_base 15: mod_base = OTHER; note = Nucleotide with phosphorothioate linkage
  modified_base 16: mod_base = OTHER; note = 2'-O-methoxyethyl modified nucleotide with phosphorothioate linkage
  modified_base 17: mod_base = OTHER; note = Locked thymine with phosphorothioate linkage
  modified_base 18: mod_base = OTHER; note = Tert-butylguanidine bridged nucleic acid with phosphorothioate linkage
  modified_base 19: mod_base = OTHER; note = 2'-O-methoxyethyl 5-methylcytosine with phosphorothioate linkage
  modified_base 20: mod_base = OTHER; note = 2'-O-methoxyethyl modified nucleotide
  misc_feature 1..5: note = RNA
  misc_feature 6..15: note = DNA
  misc_feature 16..20: note = RNA
cagaggtgaagcgaagtgca

SEQ ID NO: 1161 - DNA, 20 bp, synthetic construct
  source 1..20: mol_type = other DNA
  modified_base 1: mod_base = OTHER; note = 2'-O-methoxyethyl 5-methylcytosine with phosphorothioate linkage
  modified_base 2: mod_base = OTHER; note = 2'-O-methoxyethyl modified nucleotide with phosphorothioate linkage
  modified_base 3: mod_base = OTHER; note = 2'-O-methoxyethyl modified nucleotide with phosphorothioate linkage
  modified_base 4: mod_base = OTHER; note = 2'-O-methoxyethyl modified nucleotide with phosphorothioate linkage
  modified_base 5: mod_base = OTHER; note = 2'-O-methoxyethyl modified nucleotide with phosphorothioate linkage
  modified_base 6: mod_base = OTHER; note = Nucleotide with phosphorothioate linkage
  modified_base 7: mod_base = OTHER; note = Thymine with phosphorothioate linkage
  modified_base 8: mod_base = OTHER; note = Nucleotide with phosphorothioate linkage
  modified_base 9: mod_base = OTHER; note = Nucleotide with phosphorothioate linkage
  modified_base 10: mod_base = OTHER; note = Nucleotide with phosphorothioate linkage
  modified_base 11: mod_base = OTHER; note = Nucleotide with phosphorothioate linkage
  modified_base 12: mod_base = OTHER; note = 5-methylcytosine with phosphorothioate linkage
  modified_base 13: mod_base = OTHER; note = Nucleotide with phosphorothioate linkage
  modified_base 14: mod_base = OTHER; note = Nucleotide with phosphorothioate linkage
  modified_base 15: mod_base = OTHER; note = Nucleotide with phosphorothioate linkage
  modified_base 16: mod_base = OTHER; note = 2'-O-methoxyethyl modified nucleotide with phosphorothioate linkage
  modified_base 17: mod_base = OTHER; note = 2'-O-methoxyethyl modified thymine with phosphorothioate linkage
  modified_base 18: mod_base = OTHER; note = Tert-butylguanidine bridged nucleic acid with phosphorothioate linkage
  modified_base 19: mod_base = OTHER; note = Locked 5-methylcytosine with phosphorothioate linkage
  modified_base 20: mod_base = OTHER; note = 2'-O-methoxyethyl modified nucleotide
  misc_feature 1..5: note = RNA
  misc_feature 6..15: note = DNA
  misc_feature 16..20: note = RNA
cagaggtgaagcgaagtgca

SEQ ID NO: 1162 - DNA, 20 bp, synthetic construct
  source 1..20: mol_type = other DNA
  modified_base 1: mod_base = OTHER; note = 2'-O-methoxyethyl 5-methylcytosine with phosphorothioate linkage
  modified_base 2: mod_base = OTHER; note = 2'-O-methoxyethyl modified nucleotide with phosphorothioate linkage
  modified_base 3: mod_base = OTHER; note = 2'-O-methoxyethyl modified nucleotide with phosphorothioate linkage
  modified_base 4: mod_base = OTHER; note = 2'-O-methoxyethyl modified nucleotide with phosphorothioate linkage
  modified_base 5: mod_base = OTHER; note = 2'-O-methoxyethyl modified nucleotide with phosphorothioate linkage
  modified_base 6: mod_base = OTHER; note = Nucleotide with phosphorothioate linkage
  modified_base 7: mod_base = OTHER; note = Thymine with phosphorothioate linkage
  modified_base 8: mod_base = OTHER; note = Nucleotide with phosphorothioate linkage
  modified_base 9: mod_base = OTHER; note = Nucleotide with phosphorothioate linkage
  modified_base 10: mod_base = OTHER; note = Nucleotide with phosphorothioate linkage
  modified_base 11: mod_base = OTHER; note = Nucleotide with phosphorothioate linkage
  modified_base 12: mod_base = OTHER; note = 5-methylcytosine with phosphorothioate linkage
  modified_base 13: mod_base = OTHER; note = Nucleotide with phosphorothioate linkage
  modified_base 14: mod_base = OTHER; note = Nucleotide with phosphorothioate linkage
  modified_base 15: mod_base = OTHER; note = Nucleotide with phosphorothioate linkage
  modified_base 16: mod_base = OTHER; note = 2'-O-methoxyethyl modified nucleotide with phosphorothioate linkage
  modified_base 17: mod_base = OTHER; note = 2'-O-methoxyethyl modified thymine with phosphorothioate linkage
  modified_base 18: mod_base = OTHER; note = Tert-butylguanidine bridged nucleic acid with phosphorothioate linkage
  modified_base 19: mod_base = OTHER; note = 2'-O-methoxyethyl 5-methylcytosine with phosphorothioate linkage
  modified_base 20: mod_base = OTHER; note = Locked nucleic acid
  misc_feature 1..5: note = RNA
  misc_feature 6..15: note = DNA
  misc_feature 16..20: note = RNA
cagaggtgaagcgaagtgca

SEQ ID NO: 1163 - DNA, 20 bp, synthetic construct
  source 1..20: mol_type = other DNA
  modified_base 1: mod_base = OTHER; note = 2'-O-methoxyethyl 5-methylcytosine with phosphorothioate linkage
  modified_base 2: mod_base = OTHER; note = 2'-O-methoxyethyl modified nucleotide with phosphorothioate linkage
  modified_base 3: mod_base = OTHER; note = Locked nucleic acid with phosphorothioate linkage
  modified_base 4: mod_base = OTHER; note = 2'-O-methoxyethyl modified nucleotide with phosphorothioate linkage
  modified_base 5: mod_base = OTHER; note = Locked nucleic acid with phosphorothioate linkage
  modified_base 6: mod_base = OTHER; note = Nucleotide with phosphorothioate linkage
  modified_base 7: mod_base = OTHER; note = Thymine with phosphorothioate linkage
  modified_base 8: mod_base = OTHER; note = Nucleotide with phosphorothioate linkage
  modified_base 9: mod_base = OTHER; note = Nucleotide with phosphorothioate linkage
  modified_base 10: mod_base = OTHER; note = Nucleotide with phosphorothioate linkage
  modified_base 11: mod_base = OTHER; note = Nucleotide with phosphorothioate linkage
  modified_base 12: mod_base = OTHER; note = 5-methylcytosine with phosphorothioate linkage
  modified_base 13: mod_base = OTHER; note = Nucleotide with phosphorothioate linkage
  modified_base 14: mod_base = OTHER; note = Nucleotide with phosphorothioate linkage
  modified_base 15: mod_base = OTHER; note = Nucleotide with phosphorothioate linkage
  modified_base 16: mod_base = OTHER; note = 2'-O-methoxyethyl modified nucleotide with phosphorothioate linkage
  modified_base 17: mod_base = OTHER; note = 2'-O-methoxyethyl modified thymine with phosphorothioate linkage
  modified_base 18: mod_base = OTHER; note = Tert-butylguanidine bridged nucleic acid with phosphorothioate linkage
  modified_base 19: mod_base = OTHER; note = 2'-O-methoxyethyl 5-methylcytosine with phosphorothioate linkage
  modified_base 20: mod_base = OTHER; note = 2'-O-methoxyethyl modified nucleotide
  misc_feature 1..5: note = RNA
  misc_feature 6..15: note = DNA
  misc_feature 16..20: note = RNA
cagaggtgaagcgaagtgca

SEQ ID NO: 1164 - DNA, 20 bp, synthetic construct
  source 1..20: mol_type = other DNA
  modified_base 1: mod_base = OTHER; note = 2'-O-methoxyethyl 5-methylcytosine with phosphorothioate linkage
  modified_base 2: mod_base = OTHER; note = 2'-O-methoxyethyl modified nucleotide with phosphorothioate linkage
  modified_base 3: mod_base = OTHER; note = Locked nucleic acid with phosphorothioate linkage
  modified_base 4: mod_base = OTHER; note = 2'-O-methoxyethyl modified nucleotide with phosphorothioate linkage
  modified_base 5: mod_base = OTHER; note = 2'-O-methoxyethyl modified nucleotide with phosphorothioate linkage
  modified_base 6: mod_base = OTHER; note = Nucleotide with phosphorothioate linkage
  modified_base 7: mod_base = OTHER; note = Thymine with phosphorothioate linkage
  modified_base 8: mod_base = OTHER; note = Nucleotide with phosphorothioate linkage
  modified_base 9: mod_base = OTHER; note = Nucleotide with phosphorothioate linkage
  modified_base 10: mod_base = OTHER; note = Nucleotide with phosphorothioate linkage
  modified_base 11: mod_base = OTHER; note = Nucleotide with phosphorothioate linkage
  modified_base 12: mod_base = OTHER; note = 5-methylcytosine with phosphorothioate linkage
  modified_base 13: mod_base = OTHER; note = Nucleotide with phosphorothioate linkage
  modified_base 14: mod_base = OTHER; note = Nucleotide with phosphorothioate linkage
  modified_base 15: mod_base = OTHER; note = Nucleotide with phosphorothioate linkage
  modified_base 16: mod_base = OTHER; note = Locked nucleic acid with phosphorothioate linkage
  modified_base 17: mod_base = OTHER; note = 2'-O-methoxyethyl modified thymine with phosphorothioate linkage
  modified_base 18: mod_base = OTHER; note = Tert-butylguanidine bridged nucleic acid with phosphorothioate linkage
  modified_base 19: mod_base = OTHER; note = 2'-O-methoxyethyl 5-methylcytosine with phosphorothioate linkage
  modified_base 20: mod_base = OTHER; note = 2'-O-methoxyethyl modified nucleotide
  misc_feature 1..5: note = RNA
  misc_feature 6..15: note = DNA
  misc_feature 16..20: note = RNA
cagaggtgaagcgaagtgca

SEQ ID NO: 1165 - DNA, 20 bp, synthetic construct
  source 1..20: mol_type = other DNA
  modified_base 1: mod_base = OTHER; note = 2'-O-methoxyethyl 5-methylcytosine with phosphorothioate linkage
  modified_base 2: mod_base = OTHER; note = 2'-O-methoxyethyl modified nucleotide with phosphorothioate linkage
  modified_base 3: mod_base = OTHER; note = 2'-O-methoxyethyl modified nucleotide with phosphorothioate linkage
  modified_base 4: mod_base = OTHER; note = 2'-O-methoxyethyl modified nucleotide with phosphorothioate linkage
  modified_base 5: mod_base = OTHER; note = Locked nucleic acid with phosphorothioate linkage
  modified_base 6: mod_base = OTHER; note = Nucleotide with phosphorothioate linkage
  modified_base 7: mod_base = OTHER; note = Thymine with phosphorothioate linkage
  modified_base 8: mod_base = OTHER; note = Nucleotide with phosphorothioate linkage
  modified_base 9: mod_base = OTHER; note = Nucleotide with phosphorothioate linkage
  modified_base 10: mod_base = OTHER; note = Nucleotide with phosphorothioate linkage
  modified_base 11: mod_base = OTHER; note = Nucleotide with phosphorothioate linkage
  modified_base 12: mod_base = OTHER; note = 5-methylcytosine with phosphorothioate linkage
  modified_base 13: mod_base = OTHER; note = Nucleotide with phosphorothioate linkage
  modified_base 14: mod_base = OTHER; note = Nucleotide with phosphorothioate linkage
  modified_base 15: mod_base = OTHER; note = Nucleotide with phosphorothioate linkage
  modified_base 16: mod_base = OTHER; note = Locked nucleic acid with phosphorothioate linkage
  modified_base 17: mod_base = OTHER; note = 2'-O-methoxyethyl modified thymine with phosphorothioate linkage
  modified_base 18: mod_base = OTHER; note = Tert-butylguanidine bridged nucleic acid with phosphorothioate linkage
  modified_base 19: mod_base = OTHER; note = 2'-O-methoxyethyl 5-methylcytosine with phosphorothioate linkage
  modified_base 20: mod_base = OTHER; note = 2'-O-methoxyethyl modified nucleotide
  misc_feature 1..5: note = RNA
  misc_feature 6..15: note = DNA
  misc_feature 16..20: note = RNA
cagaggtgaagcgaagtgca

SEQ ID NO: 1166 - DNA, 20 bp, synthetic construct
  source 1..20: mol_type = other DNA
  modified_base 1: mod_base = OTHER; note = 2'-O-methoxyethyl 5-methylcytosine with phosphorothioate linkage
  modified_base 2: mod_base = OTHER; note = 2'-O-methoxyethyl modified nucleotide with phosphorothioate linkage
  modified_base 3: mod_base = OTHER; note = 2'-O-methoxyethyl modified nucleotide with phosphorothioate linkage
  modified_base 4: mod_base = OTHER; note = 2'-O-methoxyethyl modified nucleotide with phosphorothioate linkage
  modified_base 5: mod_base = OTHER; note = 2'-O-methoxyethyl modified nucleotide with phosphorothioate linkage
  modified_base 6: mod_base = OTHER; note = Nucleotide with phosphorothioate linkage
  modified_base 7: mod_base = OTHER; note = Thymine with phosphorothioate linkage
  modified_base 8: mod_base = OTHER; note = Nucleotide with phosphorothioate linkage
  modified_base 9: mod_base = OTHER; note = Nucleotide with phosphorothioate linkage
  modified_base 10: mod_base = OTHER; note = Nucleotide with phosphorothioate linkage
  modified_base 11: mod_base = OTHER; note = Nucleotide with phosphorothioate linkage
  modified_base 12: mod_base = OTHER; note = 5-methylcytosine with phosphorothioate linkage
  modified_base 13: mod_base = OTHER; note = Nucleotide with phosphorothioate linkage
  modified_base 14: mod_base = OTHER; note = Nucleotide with phosphorothioate linkage
  modified_base 15: mod_base = OTHER; note = Nucleotide with phosphorothioate linkage
  modified_base 16: mod_base = OTHER; note = Locked nucleic acid with phosphorothioate linkage
  modified_base 17: mod_base = OTHER; note = 2'-O-methoxyethyl modified thymine with phosphorothioate linkage
  modified_base 18: mod_base = OTHER; note = Tert-butylguanidine bridged nucleic acid with phosphorothioate linkage
  modified_base 19: mod_base = OTHER; note = 2'-O-methoxyethyl 5-methylcytosine with phosphorothioate linkage
  modified_base 20: mod_base = OTHER; note = Locked nucleic acid
  misc_feature 1..5: note = RNA
  misc_feature 6..15: note = DNA
  misc_feature 16..20: note = RNA
cagaggtgaagcgaagtgca

SEQ ID NO: 1167 - DNA, 20 bp, synthetic construct
  source 1..20: mol_type = other DNA
  modified_base 1: mod_base = OTHER; note = 2'-O-methoxyethyl 5-methylcytosine with phosphorothioate linkage
  modified_base 2: mod_base = OTHER; note = Locked nucleic acid with phosphorothioate linkage
  modified_base 3: mod_base = OTHER; note = 2'-O-methoxyethyl modified nucleotide with phosphorothioate linkage
  modified_base 4: mod_base = OTHER; note = 2'-O-methoxyethyl modified nucleotide with phosphorothioate linkage
  modified_base 5: mod_base = OTHER; note = 2'-O-methoxyethyl modified nucleotide with phosphorothioate linkage
  modified_base 6: mod_base = OTHER; note = Nucleotide with phosphorothioate linkage
  modified_base 7: mod_base = OTHER; note = Thymine with phosphorothioate linkage
  modified_base 8: mod_base = OTHER; note = Nucleotide with phosphorothioate linkage
  modified_base 9: mod_base = OTHER; note = Nucleotide with phosphorothioate linkage
  modified_base 10: mod_base = OTHER; note = Nucleotide with phosphorothioate linkage
  modified_base 11: mod_base = OTHER; note = Nucleotide with phosphorothioate linkage
  modified_base 12: mod_base = OTHER; note = 5-methylcytosine with phosphorothioate linkage
  modified_base 13: mod_base = OTHER; note = Nucleotide with phosphorothioate linkage
  modified_base 14: mod_base = OTHER; note = Nucleotide with phosphorothioate linkage
  modified_base 15: mod_base = OTHER; note = Nucleotide with phosphorothioate linkage
  modified_base 16: mod_base = OTHER; note = 2'-O-methoxyethyl modified nucleotide with phosphorothioate linkage
  modified_base 17: mod_base = OTHER; note = Locked thymine with phosphorothioate linkage
  modified_base 18: mod_base = OTHER; note = Tert-butylguanidine bridged nucleic acid with phosphorothioate linkage
  modified_base 19: mod_base = OTHER; note = 2'-O-methoxyethyl 5-methylcytosine with phosphorothioate linkage
  modified_base 20: mod_base = OTHER; note = 2'-O-methoxyethyl modified nucleotide
  misc_feature 1..5: note = RNA
  misc_feature 6..15: note = DNA
  misc_feature 16..20: note = RNA
cagaggtgaagcgaagtgca

SEQ ID NO: 1168 - DNA, 20 bp, synthetic construct
  source 1..20: mol_type = other DNA
  modified_base 1: mod_base = OTHER; note = 2'-O-methoxyethyl 5-methylcytosine with phosphorothioate linkage
  modified_base 2: mod_base = OTHER; note = 2'-O-methoxyethyl modified nucleotide with phosphorothioate linkage
  modified_base 3: mod_base = OTHER; note = 2'-O-methyl modified nucleotide with phosphorothioate linkage
  modified_base 4: mod_base = OTHER; note = 2'-O-methoxyethyl modified nucleotide with phosphorothioate linkage
  modified_base 5: mod_base = OTHER; note = 2'-O-methyl modified nucleotide with phosphorothioate linkage
  modified_base 6: mod_base = OTHER; note = Nucleotide with phosphorothioate linkage
  modified_base 7: mod_base = OTHER; note = Thymine with phosphorothioate linkage
  modified_base 8: mod_base = OTHER; note = Nucleotide with phosphorothioate linkage
  modified_base 9: mod_base = OTHER; note = Nucleotide with phosphorothioate linkage
  modified_base 10: mod_base = OTHER; note = Nucleotide with phosphorothioate linkage
  modified_base 11: mod_base = OTHER; note = Nucleotide with phosphorothioate linkage
  modified_base 12: mod_base = OTHER; note = 5-methylcytosine with phosphorothioate linkage
  modified_base 13: mod_base = OTHER; note = Nucleotide with phosphorothioate linkage
  modified_base 14: mod_base = OTHER; note = Nucleotide with phosphorothioate linkage
  modified_base 15: mod_base = OTHER; note = Nucleotide with phosphorothioate linkage
  modified_base 16: mod_base = OTHER; note = 2'-O-methoxyethyl modified nucleotide with phosphorothioate linkage
  modified_base 17: mod_base = OTHER; note = 2'-O-methoxyethyl modified thymine with phosphorothioate linkage
  modified_base 18: mod_base = OTHER; note = 2'-O-methoxyethyl modified nucleotide with phosphorothioate linkage
  modified_base 19: mod_base = OTHER; note = Tert-butylguanidine bridged 5-methylcytosine with phosphorothioate linkage
  modified_base 20: mod_base = OTHER; note = 2'-O-methoxyethyl modified nucleotide
  misc_feature 1..5: note = RNA
  misc_feature 6..15: note = DNA
  misc_feature 16..20: note = RNA
cagaggtgaagcgaagtgca

SEQ ID NO: 1169 - DNA, 20 bp, synthetic construct
  source 1..20: mol_type = other DNA
  modified_base 1: mod_base = OTHER; note = 2'-O-methoxyethyl 5-methylcytosine with phosphorothioate linkage
  modified_base 2: mod_base = OTHER; note = 2'-O-methoxyethyl modified nucleotide with phosphorothioate linkage
  modified_base 3: mod_base = OTHER; note = 2'-O-methoxyethyl modified nucleotide with phosphorothioate linkage
  modified_base 4: mod_base = OTHER; note = 2'-O-methoxyethyl modified nucleotide with phosphorothioate linkage
  modified_base 5: mod_base = OTHER; note = 2'-O-methoxyethyl modified nucleotide with phosphorothioate linkage
  modified_base 6: mod_base = OTHER; note = Nucleotide with phosphorothioate linkage
  modified_base 7: mod_base = OTHER; note = Thymine with phosphorothioate linkage
  modified_base 8: mod_base = OTHER; note = Nucleotide with phosphorothioate linkage
  modified_base 9: mod_base = OTHER; note = Nucleotide with phosphorothioate linkage
  modified_base 10: mod_base = OTHER; note = Nucleotide with phosphorothioate linkage
  modified_base 11: mod_base = OTHER; note = Nucleotide with phosphorothioate linkage
  modified_base 12: mod_base = OTHER; note = 5-methylcytosine with phosphorothioate linkage
  modified_base 13: mod_base = OTHER; note = Nucleotide with phosphorothioate linkage
  modified_base 14: mod_base = OTHER; note = Nucleotide with phosphorothioate linkage
  modified_base 15: mod_base = OTHER; note = Nucleotide with phosphorothioate linkage
  modified_base 16: mod_base = OTHER; note = 2'-O-methoxyethyl modified nucleotide with phosphorothioate linkage
  modified_base 17: mod_base = OTHER; note = 2'-O-methoxyethyl modified thymine with phosphorothioate linkage
  modified_base 18: mod_base = OTHER; note = 2'-O-methyl modified nucleotide with phosphorothioate linkage
  modified_base 19: mod_base = OTHER; note = Tert-butylguanidine bridged 5-methylcytosine with phosphorothioate linkage
  modified_base 20: mod_base = OTHER; note = 2'-O-methyl modified nucleotide
  misc_feature 1..5: note = RNA
  misc_feature 6..15: note = DNA
  misc_feature 16..20: note = RNA
cagaggtgaagcgaagtgca

SEQ ID NO: 1170 - DNA, 20 bp, synthetic construct
  source 1..20: mol_type = other DNA
  modified_base 1: mod_base = OTHER; note = 2'-O-methoxyethyl 5-methylcytosine with phosphorothioate linkage
  modified_base 2: mod_base = OTHER; note = 2'-O-methoxyethyl modified nucleotide with phosphorothioate linkage
  modified_base 3: mod_base = OTHER; note = 2'-O-methoxyethyl modified nucleotide with phosphorothioate linkage
  modified_base 4: mod_base = OTHER; note = 2'-O-methoxyethyl modified nucleotide with phosphorothioate linkage
  modified_base 5: mod_base = OTHER; note = 2'-O-methoxyethyl modified nucleotide with phosphorothioate linkage
  modified_base 6: mod_base = OTHER; note = Nucleotide with phosphorothioate linkage
  modified_base 7: mod_base = OTHER; note = Thymine with phosphorothioate linkage
  modified_base 8: mod_base = OTHER; note = Nucleotide with phosphorothioate linkage
  modified_base 9: mod_base = OTHER; note = Nucleotide with phosphorothioate linkage
  modified_base 10: mod_base = OTHER; note = Nucleotide with phosphorothioate linkage
  modified_base 11: mod_base = OTHER; note = Nucleotide with phosphorothioate linkage
  modified_base 12: mod_base = OTHER; note = 5-methylcytosine with phosphorothioate linkage
  modified_base 13: mod_base = OTHER; note = Nucleotide with phosphorothioate linkage
  modified_base 14: mod_base = OTHER; note = Nucleotide with phosphorothioate linkage
  modified_base 15: mod_base = OTHER; note = Nucleotide with phosphorothioate linkage
  modified_base 16: mod_base = OTHER; note = 2'-O-methyl modified nucleotide with phosphorothioate linkage
  modified_base 17: mod_base = OTHER; note = 2'-O-methoxyethyl modified thymine with phosphorothioate linkage
  modified_base 18: mod_base = OTHER; note = 2'-O-methyl modified nucleotide with phosphorothioate linkage
  modified_base 19: mod_base = OTHER; note = Tert-butylguanidine bridged 5-methylcytosine with phosphorothioate linkage
  modified_base 20: mod_base = OTHER; note = 2'-O-methoxyethyl modified nucleotide
  misc_feature 1..5: note = RNA
  misc_feature 6..15: note = DNA
  misc_feature 16..20: note = RNA
cagaggtgaagcgaagtgca

SEQ ID NO: 1171 - DNA, 20 bp, synthetic construct
  source 1..20: mol_type = other DNA
  modified_base 1: mod_base = OTHER; note = 2'-O-methoxyethyl 5-methylcytosine with phosphorothioate linkage
  modified_base 2: mod_base = OTHER; note = 2'-O-methoxyethyl modified nucleotide with phosphorothioate linkage
  modified_base 3: mod_base = OTHER; note = 2'-O-methoxyethyl modified nucleotide with phosphorothioate linkage
  modified_base 4: mod_base = OTHER; note = 2'-O-methoxyethyl modified nucleotide with phosphorothioate linkage
  modified_base 5: mod_base = OTHER; note = 2'-O-methoxyethyl modified nucleotide with phosphorothioate linkage
  modified_base 6: mod_base = OTHER; note = Nucleotide with phosphorothioate linkage
  modified_base 7: mod_base = OTHER; note = Thymine with phosphorothioate linkage
  modified_base 8: mod_base = OTHER; note = Nucleotide with phosphorothioate linkage
  modified_base 9: mod_base = OTHER; note = Nucleotide with phosphorothioate linkage
  modified_base 10: mod_base = OTHER; note = Nucleotide with phosphorothioate linkage
  modified_base 11: mod_base = OTHER; note = Nucleotide with phosphorothioate linkage
  modified_base 12: mod_base = OTHER; note = 5-methylcytosine with phosphorothioate linkage
  modified_base 13: mod_base = OTHER; note = Nucleotide with phosphorothioate linkage
  modified_base 14: mod_base = OTHER; note = Nucleotide with phosphorothioate linkage
  modified_base 15: mod_base = OTHER; note = Nucleotide with phosphorothioate linkage
  modified_base 16: mod_base = OTHER; note = Locked nucleic acid with phosphorothioate linkage
  modified_base 17: mod_base = OTHER; note = 2'-O-methoxyethyl modified thymine with phosphorothioate linkage
  modified_base 18: mod_base = OTHER; note = 2'-O-methoxyethyl modified nucleotide with phosphorothioate linkage
  modified_base 19: mod_base = OTHER; note = Tert-butylguanidine bridged 5-methylcytosine with phosphorothioate linkage
  modified_base 20: mod_base = OTHER; note = 2'-O-methoxyethyl modified nucleotide
  misc_feature 1..5: note = RNA
  misc_feature 6..15: note = DNA
  misc_feature 16..20: note = RNA
cagaggtgaagcgaagtgca

SEQ ID NO: 1172 - DNA, 20 bp, synthetic construct
  source 1..20: mol_type = other DNA
  modified_base 1: mod_base = OTHER; note = 2'-O-methoxyethyl 5-methylcytosine with phosphorothioate linkage
  modified_base 2: mod_base = OTHER; note = 2'-O-methoxyethyl modified nucleotide with phosphorothioate linkage
  modified_base 3: mod_base = OTHER; note = 2'-O-methoxyethyl modified nucleotide with phosphorothioate linkage
  modified_base 4: mod_base = OTHER; note = 2'-O-methoxyethyl modified nucleotide with phosphorothioate linkage
  modified_base 5: mod_base = OTHER; note = 2'-O-methoxyethyl modified nucleotide with phosphorothioate linkage
  modified_base 6: mod_base = OTHER; note = Nucleotide with phosphorothioate linkage
  modified_base 7: mod_base = OTHER; note = Thymine with phosphorothioate linkage
  modified_base 8: mod_base = OTHER; note = Nucleotide with phosphorothioate linkage
  modified_base 9: mod_base = OTHER; note = Nucleotide with phosphorothioate linkage
  modified_base 10: mod_base = OTHER; note = Nucleotide with phosphorothioate linkage
  modified_base 11: mod_base = OTHER; note = Nucleotide with phosphorothioate linkage
  modified_base 12: mod_base = OTHER; note = 5-methylcytosine with phosphorothioate linkage
  modified_base 13: mod_base = OTHER; note = Nucleotide with phosphorothioate linkage
  modified_base 14: mod_base = OTHER; note = Nucleotide with phosphorothioate linkage
  modified_base 15: mod_base = OTHER; note = Nucleotide with phosphorothioate linkage
  modified_base 16: mod_base = OTHER; note = 2'-O-methoxyethyl modified nucleotide with phosphorothioate linkage
  modified_base 17: mod_base = OTHER; note = Locked thymine with phosphorothioate linkage
  modified_base 18: mod_base = OTHER; note = 2'-O-methoxyethyl modified nucleotide with phosphorothioate linkage
  modified_base 19: mod_base = OTHER; note = Tert-butylguanidine bridged 5-methylcytosine with phosphorothioate linkage
  modified_base 20: mod_base = OTHER; note = 2'-O-methoxyethyl modified nucleotide
  misc_feature 1..5: note = RNA
  misc_feature 6..15: note = DNA
  misc_feature 16..20: note = RNA
cagaggtgaagcgaagtgca

SEQ ID NO: 1173 - DNA, 20 bp, synthetic construct
  source 1..20: mol_type = other DNA
  modified_base 1: mod_base = OTHER; note = 2'-O-methoxyethyl 5-methylcytosine with phosphorothioate linkage
  modified_base 2: mod_base = OTHER; note = 2'-O-methoxyethyl modified nucleotide with phosphorothioate linkage
  modified_base 3: mod_base = OTHER; note = 2'-O-methoxyethyl modified nucleotide with phosphorothioate linkage
  modified_base 4: mod_base = OTHER; note = 2'-O-methoxyethyl modified nucleotide with phosphorothioate linkage
  modified_base 5: mod_base = OTHER; note = 2'-O-methoxyethyl modified nucleotide with phosphorothioate linkage
  modified_base 6: mod_base = OTHER; note = Nucleotide with phosphorothioate linkage
  modified_base 7: mod_base = OTHER; note = Thymine with phosphorothioate linkage
  modified_base 8: mod_base = OTHER; note = Nucleotide with phosphorothioate linkage
  modified_base 9: mod_base = OTHER; note = Nucleotide with phosphorothioate linkage
  modified_base 10: mod_base = OTHER; note = Nucleotide with phosphorothioate linkage
  modified_base 11: mod_base = OTHER; note = Nucleotide with phosphorothioate linkage
  modified_base 12: mod_base = OTHER; note = 5-methylcytosine with phosphorothioate linkage
  modified_base 13: mod_base = OTHER; note = Nucleotide with phosphorothioate linkage
  modified_base 14: mod_base = OTHER; note = Nucleotide with phosphorothioate linkage
  modified_base 15: mod_base = OTHER; note = Nucleotide with phosphorothioate linkage
  modified_base 16: mod_base = OTHER; note = 2'-O-methoxyethyl modified nucleotide with phosphorothioate linkage
  modified_base 17: mod_base = OTHER; note = 2'-O-methoxyethyl modified thymine with phosphorothioate linkage
  modified_base 18: mod_base = OTHER; note = Locked nucleic acid with phosphorothioate linkage
  modified_base 19: mod_base = OTHER; note = Tert-butylguanidine bridged 5-methylcytosine with phosphorothioate linkage
  modified_base 20: mod_base = OTHER; note = 2'-O-methoxyethyl modified nucleotide
  misc_feature 1..5: note = RNA
  misc_feature 6..15: note = DNA
  misc_feature 16..20: note = RNA
cagaggtgaagcgaagtgca

SEQ ID NO: 1174 - DNA, 20 bp, synthetic construct
  source 1..20: mol_type = other DNA
  modified_base 1: mod_base = OTHER; note = 2'-O-methoxyethyl 5-methylcytosine with phosphorothioate linkage
  modified_base 2: mod_base = OTHER; note = 2'-O-methoxyethyl modified nucleotide with phosphorothioate linkage
  modified_base 3: mod_base = OTHER; note = 2'-O-methoxyethyl modified nucleotide with phosphorothioate linkage
  modified_base 4: mod_base = OTHER; note = 2'-O-methoxyethyl modified nucleotide with phosphorothioate linkage
  modified_base 5: mod_base = OTHER; note = 2'-O-methoxyethyl modified nucleotide with phosphorothioate linkage
  modified_base 6: mod_base = OTHER; note = Nucleotide with phosphorothioate linkage
  modified_base 7: mod_base = OTHER; note = Thymine with phosphorothioate linkage
  modified_base 8: mod_base = OTHER; note = Nucleotide with phosphorothioate linkage
  modified_base 9: mod_base = OTHER; note = Nucleotide with phosphorothioate linkage
  modified_base 10: mod_base = OTHER; note = Nucleotide with phosphorothioate linkage
  modified_base 11: mod_base = OTHER; note = Nucleotide with phosphorothioate linkage
  modified_base 12: mod_base = OTHER; note = 5-methylcytosine with phosphorothioate linkage
  modified_base 13: mod_base = OTHER; note = Nucleotide with phosphorothioate linkage
  modified_base 14: mod_base = OTHER; note = Nucleotide with phosphorothioate linkage
  modified_base 15: mod_base = OTHER; note = Nucleotide with phosphorothioate linkage
  modified_base 16: mod_base = OTHER; note = 2'-O-methoxyethyl modified nucleotide with phosphorothioate linkage
  modified_base 17: mod_base = OTHER; note = 2'-O-methoxyethyl modified thymine with phosphorothioate linkage
  modified_base 18: mod_base = OTHER; note = 2'-O-methoxyethyl modified nucleotide with phosphorothioate linkage
  modified_base 19: mod_base = OTHER; note = Tert-butylguanidine bridged 5-methylcytosine with phosphorothioate linkage
  modified_base 20: mod_base = OTHER; note = Locked nucleic acid
  misc_feature 1..5: note = RNA
  misc_feature 6..15: note = DNA
  misc_feature 16..20: note = RNA
cagaggtgaagcgaagtgca

SEQ ID NO: 1175 - DNA, 20 bp, synthetic construct
  source 1..20: mol_type = other DNA
  modified_base 1: mod_base = OTHER; note = 2'-O-methoxyethyl 5-methylcytosine with phosphorothioate linkage
  modified_base 2: mod_base = OTHER; note = 2'-O-methoxyethyl modified nucleotide with phosphorothioate linkage
  modified_base 3: mod_base = OTHER; note = Locked nucleic acid with phosphorothioate linkage
  modified_base 4: mod_base = OTHER; note = 2'-O-methoxyethyl modified nucleotide with phosphorothioate linkage
  modified_base 5: mod_base = OTHER; note = Locked nucleic acid with phosphorothioate linkage
  modified_base 6: mod_base = OTHER; note = Nucleotide with phosphorothioate linkage
  modified_base 7: mod_base = OTHER; note = Thymine with phosphorothioate linkage
  modified_base 8: mod_base = OTHER; note = Nucleotide with phosphorothioate linkage
  modified_base 9: mod_base = OTHER; note = Nucleotide with phosphorothioate linkage
  modified_base 10: mod_base = OTHER; note = Nucleotide with phosphorothioate linkage
  modified_base 11: mod_base = OTHER; note = Nucleotide with phosphorothioate linkage
  modified_base 12: mod_base = OTHER; note = 5-methylcytosine with phosphorothioate linkage
  modified_base 13: mod_base = OTHER; note = Nucleotide with phosphorothioate linkage
  modified_base 14: mod_base = OTHER; note = Nucleotide with phosphorothioate linkage
  modified_base 15: mod_base = OTHER; note = Nucleotide with phosphorothioate linkage
  modified_base 16: mod_base = OTHER; note = 2'-O-methoxyethyl modified nucleotide with phosphorothioate linkage
  modified_base 17: mod_base = OTHER; note = 2'-O-methoxyethyl modified thymine with phosphorothioate linkage
  modified_base 18: mod_base = OTHER; note = 2'-O-methoxyethyl modified nucleotide with phosphorothioate linkage
  modified_base 19: mod_base = OTHER; note = Tert-butylguanidine bridged 5-methylcytosine with phosphorothioate linkage
  modified_base 20: mod_base = OTHER; note = 2'-O-methoxyethyl modified nucleotide
  misc_feature 1..5: note = RNA
  misc_feature 6..15: note = DNA
  misc_feature 16..20: note = RNA
cagaggtgaagcgaagtgca

SEQ ID NO: 1176 - DNA, 20 bp, synthetic construct
  source 1..20: mol_type = other DNA
  modified_base 1: mod_base = OTHER; note = 2'-O-methoxyethyl 5-methylcytosine with phosphorothioate linkage
  modified_base 2: mod_base = OTHER; note = 2'-O-methoxyethyl modified nucleotide with phosphorothioate linkage
  modified_base 3: mod_base = OTHER; note = Locked nucleic acid with phosphorothioate linkage
  modified_base 4: mod_base = OTHER; note = 2'-O-methoxyethyl modified nucleotide with phosphorothioate linkage
  modified_base 5: mod_base = OTHER; note = 2'-O-methoxyethyl modified nucleotide with phosphorothioate linkage
  modified_base 6: mod_base = OTHER; note = Nucleotide with phosphorothioate linkage
  modified_base 7: mod_base = OTHER; note = Thymine with phosphorothioate linkage
  modified_base 8: mod_base = OTHER; note = Nucleotide with phosphorothioate linkage
  modified_base 9: mod_base = OTHER; note = Nucleotide with phosphorothioate linkage
  modified_base 10: mod_base = OTHER; note = Nucleotide with phosphorothioate linkage
  modified_base 11: mod_base = OTHER; note = Nucleotide with phosphorothioate linkage
  modified_base 12: mod_base = OTHER; note = 5-methylcytosine with phosphorothioate linkage
  modified_base 13: mod_base = OTHER; note = Nucleotide with phosphorothioate linkage
  modified_base 14: mod_base = OTHER; note = Nucleotide with phosphorothioate linkage
  modified_base 15: mod_base = OTHER; note = Nucleotide with phosphorothioate linkage
  modified_base 16: mod_base = OTHER; note = Locked nucleic acid with phosphorothioate linkage
  modified_base 17: mod_base = OTHER; note = 2'-O-methoxyethyl modified thymine with phosphorothioate linkage
  modified_base 18: mod_base = OTHER; note = 2'-O-methoxyethyl modified nucleotide with phosphorothioate linkage
  modified_base 19: mod_base = OTHER; note = Tert-butylguanidine bridged 5-methylcytosine with phosphorothioate linkage
  modified_base 20: mod_base = OTHER; note = 2'-O-methoxyethyl modified nucleotide
  misc_feature 1..5: note = RNA
  misc_feature 6..15: note = DNA
  misc_feature 16..20: note = RNA
cagaggtgaagcgaagtgca

SEQ ID NO: 1177 - DNA, 20 bp, synthetic construct
  source 1..20: mol_type = other DNA
  modified_base 1: mod_base = OTHER; note = 2'-O-methoxyethyl 5-methylcytosine with phosphorothioate linkage
  modified_base 2: mod_base = OTHER; note = 2'-O-methoxyethyl modified nucleotide with phosphorothioate linkage
  modified_base 3: mod_base = OTHER; note = 2'-O-methoxyethyl modified nucleotide with phosphorothioate linkage
  modified_base 4: mod_base = OTHER; note = 2'-O-methoxyethyl modified nucleotide with phosphorothioate linkage
  modified_base 5: mod_base = OTHER; note = Locked nucleic acid with phosphorothioate linkage
  modified_base 6: mod_base = OTHER; note = Nucleotide with phosphorothioate linkage
  modified_base 7: mod_base = OTHER; note = Thymine with phosphorothioate linkage
  modified_base 8: mod_base = OTHER; note = Nucleotide with phosphorothioate linkage
  modified_base 9: mod_base = OTHER; note = Nucleotide with phosphorothioate linkage
  modified_base 10: mod_base = OTHER; note = Nucleotide with phosphorothioate linkage
  modified_base 11: mod_base = OTHER; note = Nucleotide with phosphorothioate linkage
  modified_base 12: mod_base = OTHER; note = 5-methylcytosine with phosphorothioate linkage
  modified_base 13: mod_base = OTHER; note = Nucleotide with phosphorothioate linkage
  modified_base 14: mod_base = OTHER; note = Nucleotide with phosphorothioate linkage
  modified_base 15: mod_base = OTHER; note = Nucleotide with phosphorothioate linkage
  modified_base 16: mod_base = OTHER; note = Locked nucleic acid with phosphorothioate linkage
  modified_base 17: mod_base = OTHER; note = 2'-O-methoxyethyl modified thymine with phosphorothioate linkage
  modified_base 18: mod_base = OTHER; note = 2'-O-methoxyethyl modified nucleotide with phosphorothioate linkage
  modified_base 19: mod_base = OTHER; note = Tert-butylguanidine bridged 5-methylcytosine with phosphorothioate linkage
  modified_base 20: mod_base = OTHER; note = 2'-O-methoxyethyl modified nucleotide
  misc_feature 1..5: note = RNA
  misc_feature 6..15: note = DNA
  misc_feature 16..20: note = RNA
cagaggtgaagcgaagtgca

SEQ ID NO: 1178 - DNA, 20 bp, synthetic construct
  source 1..20: mol_type = other DNA
  modified_base 1: mod_base = OTHER; note = 2'-O-methoxyethyl 5-methylcytosine with phosphorothioate linkage
  modified_base 2: mod_base = OTHER; note = 2'-O-methoxyethyl modified nucleotide with phosphorothioate linkage
  modified_base 3: mod_base = OTHER; note = 2'-O-methoxyethyl modified nucleotide with phosphorothioate linkage
  modified_base 4: mod_base = OTHER; note = 2'-O-methoxyethyl modified nucleotide with phosphorothioate linkage
  modified_base 5: mod_base = OTHER; note = 2'-O-methoxyethyl modified nucleotide with phosphorothioate linkage
  modified_base 6: mod_base = OTHER; note = Nucleotide with phosphorothioate linkage
  modified_base 7: mod_base = OTHER; note = Thymine with phosphorothioate linkage
  modified_base 8: mod_base = OTHER; note = Nucleotide with phosphorothioate linkage
  modified_base 9: mod_base = OTHER; note = Nucleotide with phosphorothioate linkage
  modified_base 10: mod_base = OTHER; note = Nucleotide with phosphorothioate linkage
  modified_base 11: mod_base = OTHER; note = Nucleotide with phosphorothioate linkage
  modified_base 12: mod_base = OTHER; note = 5-methylcytosine with phosphorothioate linkage
  modified_base 13: mod_base = OTHER; note = Nucleotide with phosphorothioate linkage
  modified_base 14: mod_base = OTHER; note = Nucleotide with phosphorothioate linkage
  modified_base 15: mod_base = OTHER; note = Nucleotide with phosphorothioate linkage
  modified_base 16: mod_base = OTHER; note = Locked nucleic acid with phosphorothioate linkage
  modified_base 17: mod_base = OTHER; note = 2'-O-methoxyethyl modified thymine with phosphorothioate linkage
  modified_base 18: mod_base = OTHER; note = 2'-O-methoxyethyl modified nucleotide with phosphorothioate linkage
  modified_base 19: mod_base = OTHER; note = Tert-butylguanidine bridged 5-methylcytosine with phosphorothioate linkage
  modified_base 20: mod_base = OTHER; note = Locked nucleic acid
  misc_feature 1..5: note = RNA
  misc_feature 6..15: note = DNA
  misc_feature 16..20: note = RNA
cagaggtgaagcgaagtgca

SEQ ID NO: 1179 - DNA, 20 bp, synthetic construct
  source 1..20: mol_type = other DNA
  modified_base 1: mod_base = OTHER; note = 2'-O-methoxyethyl 5-methylcytosine with phosphorothioate linkage
  modified_base 2: mod_base = OTHER; note = Locked nucleic acid with phosphorothioate linkage
  modified_base 3: mod_base = OTHER; note = 2'-O-methoxyethyl modified nucleotide with phosphorothioate linkage
  modified_base 4: mod_base = OTHER; note = 2'-O-methoxyethyl modified nucleotide with phosphorothioate linkage
  modified_base 5: mod_base = OTHER; note = 2'-O-methoxyethyl modified nucleotide with phosphorothioate linkage
  modified_base 6: mod_base = OTHER; note = Nucleotide with phosphorothioate linkage
  modified_base 7: mod_base = OTHER; note = Thymine with phosphorothioate linkage
  modified_base 8: mod_base = OTHER; note = Nucleotide with phosphorothioate linkage
  modified_base 9: mod_base = OTHER; note = Nucleotide with phosphorothioate linkage
  modified_base 10: mod_base = OTHER; note = Nucleotide with phosphorothioate linkage
  modified_base 11: mod_base = OTHER; note = Nucleotide with phosphorothioate linkage
  modified_base 12: mod_base = OTHER; note = 5-methylcytosine with phosphorothioate linkage
  modified_base 13: mod_base = OTHER; note = Nucleotide with phosphorothioate linkage
  modified_base 14: mod_base = OTHER; note = Nucleotide with phosphorothioate linkage
  modified_base 15: mod_base = OTHER; note = Nucleotide with phosphorothioate linkage
  modified_base 16: mod_base = OTHER; note = 2'-O-methoxyethyl modified nucleotide with phosphorothioate linkage
  modified_base 17: mod_base = OTHER; note = Locked thymine with phosphorothioate linkage
  modified_base 18: mod_base = OTHER; note = 2'-O-methoxyethyl modified nucleotide with phosphorothioate linkage
  modified_base 19: mod_base = OTHER; note = Tert-butylguanidine bridged 5-methylcytosine with phosphorothioate linkage
  modified_base 20: mod_base = OTHER; note = 2'-O-methoxyethyl modified nucleotide
  misc_feature 1..5: note = RNA
  misc_feature 6..15: note = DNA
  misc_feature 16..20: note = RNA
cagaggtgaagcgaagtgca

SEQ ID NO: 1180 - DNA, 20 bp, synthetic construct
  source 1..20: mol_type = other DNA
  modified_base 1: mod_base = OTHER; note = 2'-O-methoxyethyl 5-methylcytosine with phosphorothioate linkage
  modified_base 2: mod_base = OTHER; note = Locked nucleic acid with phosphorothioate linkage
  modified_base 3: mod_base = OTHER; note = 2'-O-methoxyethyl modified nucleotide with phosphorothioate linkage
  modified_base 4: mod_base = OTHER; note = 2'-O-methoxyethyl modified nucleotide with phosphorothioate linkage
  modified_base 5: mod_base = OTHER; note = 2'-O-methoxyethyl modified nucleotide with phosphorothioate linkage
  modified_base 6: mod_base = OTHER; note = Nucleotide with phosphorothioate linkage
  modified_base 7: mod_base = OTHER; note = Thymine with phosphorothioate linkage
  modified_base 8: mod_base = OTHER; note = Nucleotide with phosphorothioate linkage
  modified_base 9: mod_base = OTHER; note = Nucleotide with phosphorothioate linkage
  modified_base 10: mod_base = OTHER; note = Nucleotide with phosphorothioate linkage
  modified_base 11: mod_base = OTHER; note = Nucleotide with phosphorothioate linkage
  modified_base 12: mod_base = OTHER; note = 5-methylcytosine with phosphorothioate linkage
  modified_base 13: mod_base = OTHER; note = Nucleotide with phosphorothioate linkage
  modified_base 14: mod_base = OTHER; note = Nucleotide with phosphorothioate linkage
  modified_base 15: mod_base = OTHER; note = Nucleotide with phosphorothioate linkage
  modified_base 16: mod_base = OTHER; note = 2'-O-methoxyethyl modified nucleotide with phosphorothioate linkage
  modified_base 17: mod_base = OTHER; note = 2'-O-methoxyethyl modified thymine with phosphorothioate linkage
  modified_base 18: mod_base = OTHER; note = Locked nucleic acid with phosphorothioate linkage
  modified_base 19: mod_base = OTHER; note = Tert-butylguanidine bridged 5-methylcytosine with phosphorothioate linkage
  modified_base 20: mod_base = OTHER; note = 2'-O-methoxyethyl modified nucleotide
  misc_feature 1..5: note = RNA
  misc_feature 6..15: note = DNA
  misc_feature 16..20: note = RNA
cagaggtgaagcgaagtgca

SEQ ID NO: 1181 - DNA, 20 bp, synthetic construct
  source 1..20: mol_type = other DNA
  modified_base 1: mod_base = OTHER; note = 2'-O-methoxyethyl modified nucleotide with phosphorothioate linkage
  modified_base 2: mod_base = OTHER; note = 2'-O-methoxyethyl 5-methylcytosine with phosphorothioate linkage
  modified_base 3: mod_base = OTHER; note = Locked nucleic acid with phosphorothioate linkage
  modified_base 4: mod_base = OTHER; note = 2'-O-methoxyethyl modified nucleotide with phosphorothioate linkage
  modified_base 5: mod_base = OTHER; note = Locked nucleic acid with phosphorothioate linkage
  modified_base 6: mod_base = OTHER; note = Nucleotide with phosphorothioate linkage
  modified_base 7: mod_base = OTHER; note = Nucleotide with phosphorothioate linkage
  modified_base 8: mod_base = OTHER; note = Thymine with phosphorothioate linkage
  modified_base 9: mod_base = OTHER; note = Nucleotide with phosphorothioate linkage
  modified_base 10: mod_base = OTHER; note = Nucleotide with phosphorothioate linkage
  modified_base 11: mod_base = OTHER; note = Nucleotide with phosphorothioate linkage
  modified_base 12: mod_base = OTHER; note = Nucleotide with phosphorothioate linkage
  modified_base 13: mod_base = OTHER; note = 5-methylcytosine with phosphorothioate linkage
  modified_base 14: mod_base = OTHER; note = Nucleotide with phosphorothioate linkage
  modified_base 15: mod_base = OTHER; note = Nucleotide with phosphorothioate linkage
  modified_base 16: mod_base = OTHER; note = 2'-O-methoxyethyl modified nucleotide with phosphorothioate linkage
  modified_base 17: mod_base = OTHER; note = 2'-O-methoxyethyl modified nucleotide with phosphorothioate linkage
  modified_base 18: mod_base = OTHER; note = 2'-O-methoxyethyl modified thymine with phosphorothioate linkage
  modified_base 19: mod_base = OTHER; note = 2'-O-methoxyethyl modified nucleotide with phosphorothioate linkage
  modified_base 20: mod_base = OTHER; note = 2'-O-methoxyethyl 5-methylcytosine
  misc_feature 1..5: note = RNA
  misc_feature 6..15: note = DNA
  misc_feature 16..20: note = RNA
gcagaggtgaaacgaagtgc

SEQ ID NO: 1182 - DNA, 20 bp, synthetic construct
  source 1..20: mol_type = other DNA
  modified_base 1: mod_base = OTHER; note = 2'-O-methoxyethyl modified nucleotide with phosphorothioate linkage
  modified_base 2: mod_base = OTHER; note = 2'-O-methoxyethyl 5-methylcytosine with phosphorothioate linkage
  modified_base 3: mod_base = OTHER; note = 2'-O-methoxyethyl modified nucleotide with phosphorothioate linkage
  modified_base 4: mod_base = OTHER; note = Locked nucleic acid with phosphorothioate linkage
  modified_base 5: mod_base = OTHER; note = Locked nucleic acid with phosphorothioate linkage
  modified_base 6: mod_base = OTHER; note = Nucleotide with phosphorothioate linkage
  modified_base 7: mod_base = OTHER; note = Nucleotide with phosphorothioate linkage
  modified_base 8: mod_base = OTHER; note = Thymine with phosphorothioate linkage
  modified_base 9: mod_base = OTHER; note = Nucleotide with phosphorothioate linkage
  modified_base 10: mod_base = OTHER; note = Nucleotide with phosphorothioate linkage
  modified_base 11: mod_base = OTHER; note = Nucleotide with phosphorothioate linkage
  modified_base 12: mod_base = OTHER; note = Nucleotide with phosphorothioate linkage
  modified_base 13: mod_base = OTHER; note = 5-methylcytosine with phosphorothioate linkage
  modified_base 14: mod_base = OTHER; note = Nucleotide with phosphorothioate linkage
  modified_base 15: mod_base = OTHER; note = Nucleotide with phosphorothioate linkage
  modified_base 16: mod_base = OTHER; note = 2'-O-methoxyethyl modified nucleotide with phosphorothioate linkage
  modified_base 17: mod_base = OTHER; note = 2'-O-methoxyethyl modified nucleotide with phosphorothioate linkage
  modified_base 18: mod_base = OTHER; note = 2'-O-methoxyethyl modified thymine with phosphorothioate linkage
  modified_base 19: mod_base = OTHER; note = 2'-O-methoxyethyl modified nucleotide with phosphorothioate linkage
  modified_base 20: mod_base = OTHER; note = 2'-O-methoxyethyl 5-methylcytosine
  misc_feature 1..5: note = RNA
  misc_feature 6..15: note = DNA
  misc_feature 16..20: note = RNA
gcagaggtgaaacgaagtgc

SEQ ID NO: 1183 - DNA, 20 bp, synthetic construct
  source 1..20: mol_type = other DNA
  modified_base 1: mod_base = OTHER; note = 2'-O-methoxyethyl modified nucleotide with phosphorothioate linkage
  modified_base 2: mod_base = OTHER; note = 2'-O-methoxyethyl 5-methylcytosine with phosphorothioate linkage
  modified_base 3: mod_base = OTHER; note = 2'-O-methoxyethyl modified nucleotide with phosphorothioate linkage
  modified_base 4: mod_base = OTHER; note = Locked nucleic acid with phosphorothioate linkage
  modified_base 5: mod_base = OTHER; note = 2'-O-methoxyethyl modified nucleotide with phosphorothioate linkage
  modified_base 6: mod_base = OTHER; note = Nucleotide with phosphorothioate linkage
  modified_base 7: mod_base = OTHER; note = Nucleotide with phosphorothioate linkage
  modified_base 8: mod_base = OTHER; note = Thymine with phosphorothioate linkage
  modified_base 9: mod_base = OTHER; note = Nucleotide with phosphorothioate linkage
  modified_base 10: mod_base = OTHER; note = Nucleotide with phosphorothioate linkage
  modified_base 11: mod_base = OTHER; note = Nucleotide with phosphorothioate linkage
  modified_base 12: mod_base = OTHER; note = Nucleotide with phosphorothioate linkage
  modified_base 13: mod_base = OTHER; note = 5-methylcytosine with phosphorothioate linkage
  modified_base 14: mod_base = OTHER; note = Nucleotide with phosphorothioate linkage
  modified_base 15: mod_base = OTHER; note = Nucleotide with phosphorothioate linkage
  modified_base 16: mod_base = OTHER; note = Locked nucleic acid with phosphorothioate linkage
  modified_base 17: mod_base = OTHER; note = 2'-O-methoxyethyl modified nucleotide with phosphorothioate linkage
  modified_base 18: mod_base = OTHER; note = 2'-O-methoxyethyl modified thymine with phosphorothioate linkage
  modified_base 19: mod_base = OTHER; note = 2'-O-methoxyethyl modified nucleotide with phosphorothioate linkage
  modified_base 20: mod_base = OTHER; note = 2'-O-methoxyethyl 5-methylcytosine
  misc_feature 1..5: note = RNA
  misc_feature 6..15: note = DNA
  misc_feature 16..20: note = RNA
gcagaggtgaaacgaagtgc

SEQ ID NO: 1184 - DNA, 20 bp, synthetic construct
  source 1..20: mol_type = other DNA
  modified_base 1: mod_base = OTHER; note = 2'-O-methoxyethyl modified nucleotide with phosphorothioate linkage
  modified_base 2: mod_base = OTHER; note = 2'-O-methoxyethyl 5-methylcytosine with phosphorothioate linkage
  modified_base 3: mod_base = OTHER; note = 2'-O-methoxyethyl modified nucleotide with phosphorothioate linkage
  modified_base 4: mod_base = OTHER; note = 2'-O-methoxyethyl modified nucleotide with phosphorothioate linkage
  modified_base 5: mod_base = OTHER; note = Locked nucleic acid with phosphorothioate linkage
  modified_base 6: mod_base = OTHER; note = Nucleotide with phosphorothioate linkage
  modified_base 7: mod_base = OTHER; note = Nucleotide with phosphorothioate linkage
  modified_base 8: mod_base = OTHER; note = Thymine with phosphorothioate linkage
  modified_base 9: mod_base = OTHER; note = Nucleotide with phosphorothioate linkage
  modified_base 10: mod_base = OTHER; note = Nucleotide with phosphorothioate linkage
  modified_base 11: mod_base = OTHER; note = Nucleotide with phosphorothioate linkage
  modified_base 12: mod_base = OTHER; note = Nucleotide with phosphorothioate linkage
  modified_base 13: mod_base = OTHER; note = 5-methylcytosine with phosphorothioate linkage
  modified_base 14: mod_base = OTHER; note = Nucleotide with phosphorothioate linkage
  modified_base 15: mod_base = OTHER; note = Nucleotide with phosphorothioate linkage
  modified_base 16: mod_base = OTHER; note = Locked nucleic acid with phosphorothioate linkage
  modified_base 17: mod_base = OTHER; note = 2'-O-methoxyethyl modified nucleotide with phosphorothioate linkage
  modified_base 18: mod_base = OTHER; note = 2'-O-methoxyethyl modified thymine with phosphorothioate linkage
  modified_base 19: mod_base = OTHER; note = 2'-O-methoxyethyl modified nucleotide with phosphorothioate linkage
  modified_base 20: mod_base = OTHER; note = 2'-O-methoxyethyl 5-methylcytosine
  misc_feature 1..5: note = RNA
  misc_feature 6..15: note = DNA
  misc_feature 16..20: note = RNA
gcagaggtgaaacgaagtgc

SEQ ID NO: 1185 - DNA, 20 bp, synthetic construct
  source 1..20: mol_type = other DNA
  modified_base 1: mod_base = OTHER; note = 2'-O-methoxyethyl modified nucleotide with phosphorothioate linkage
  modified_base 2: mod_base = OTHER; note = 2'-O-methoxyethyl 5-methylcytosine with phosphorothioate linkage
  modified_base 3: mod_base = OTHER; note = 2'-O-methoxyethyl modified nucleotide with phosphorothioate linkage
  modified_base 4: mod_base = OTHER; note = 2'-O-methoxyethyl modified nucleotide with phosphorothioate linkage
  modified_base 5: mod_base = OTHER; note = Locked nucleic acid with phosphorothioate linkage
  modified_base 6: mod_base = OTHER; note = Nucleotide with phosphorothioate linkage
  modified_base 7: mod_base = OTHER; note = Nucleotide with phosphorothioate linkage
  modified_base 8: mod_base = OTHER; note = Thymine with phosphorothioate linkage
  modified_base 9: mod_base = OTHER; note = Nucleotide with phosphorothioate linkage
  modified_base 10: mod_base = OTHER; note = Nucleotide with phosphorothioate linkage
  modified_base 11: mod_base = OTHER; note = Nucleotide with phosphorothioate linkage
  modified_base 12: mod_base = OTHER; note = Nucleotide with phosphorothioate linkage
  modified_base 13: mod_base = OTHER; note = 5-methylcytosine with phosphorothioate linkage
  modified_base 14: mod_base = OTHER; note = Nucleotide with phosphorothioate linkage
  modified_base 15: mod_base = OTHER; note = Nucleotide with phosphorothioate linkage
  modified_base 16: mod_base = OTHER; note = 2'-O-methoxyethyl modified nucleotide with phosphorothioate linkage
  modified_base 17: mod_base = OTHER; note = 2'-O-methoxyethyl modified nucleotide with phosphorothioate linkage
  modified_base 18: mod_base = OTHER; note = 2'-O-methoxyethyl modified thymine with phosphorothioate linkage
  modified_base 19: mod_base = OTHER; note = Locked nucleic acid with phosphorothioate linkage
  modified_base 20: mod_base = OTHER; note = 2'-O-methoxyethyl 5-methylcytosine
  misc_feature 1..5: note = RNA
  misc_feature 6..15: note = DNA
  misc_feature 16..20: note = RNA
gcagaggtgaaacgaagtgc

SEQ ID NO: 1186 - DNA, 20 bp, synthetic construct
  source 1..20: mol_type = other DNA
  modified_base 1: mod_base = OTHER; note = 2'-O-methoxyethyl modified nucleotide with phosphorothioate linkage
  modified_base 2: mod_base = OTHER; note = 2'-O-methoxyethyl 5-methylcytosine with phosphorothioate linkage
  modified_base 3: mod_base = OTHER; note = 2'-O-methoxyethyl modified nucleotide with phosphorothioate linkage
  modified_base 4: mod_base = OTHER; note = 2'-O-methoxyethyl modified nucleotide with phosphorothioate linkage
  modified_base 5: mod_base = OTHER; note = 2'-O-methoxyethyl modified nucleotide with phosphorothioate linkage
  modified_base 6: mod_base = OTHER; note = Nucleotide with phosphorothioate linkage
  modified_base 7: mod_base = OTHER; note = Nucleotide with phosphorothioate linkage
  modified_base 8: mod_base = OTHER; note = Thymine with phosphorothioate linkage
  modified_base 9: mod_base = OTHER; note = Nucleotide with phosphorothioate linkage
  modified_base 10: mod_base = OTHER; note = Nucleotide with phosphorothioate linkage
  modified_base 11: mod_base = OTHER; note = Nucleotide with phosphorothioate linkage
  modified_base 12: mod_base = OTHER; note = Nucleotide with phosphorothioate linkage
  modified_base 13: mod_base = OTHER; note = 5-methylcytosine with phosphorothioate linkage
  modified_base 14: mod_base = OTHER; note = Nucleotide with phosphorothioate linkage
  modified_base 15: mod_base = OTHER; note = Nucleotide with phosphorothioate linkage
  modified_base 16: mod_base = OTHER; note = Locked nucleic acid with phosphorothioate linkage
  modified_base 17: mod_base = OTHER; note = 2'-O-methoxyethyl modified nucleotide with phosphorothioate linkage
  modified_base 18: mod_base = OTHER; note = Locked thymine with phosphorothioate linkage
  modified_base 19: mod_base = OTHER; note = 2'-O-methoxyethyl modified nucleotide with phosphorothioate linkage
  modified_base 20: mod_base = OTHER; note = 2'-O-methoxyethyl 5-methylcytosine
  misc_feature 1..5: note = RNA
  misc_feature 6..15: note = DNA
  misc_feature 16..20: note = RNA
gcagaggtgaaacgaagtgc

SEQ ID NO: 1187 - DNA, 20 bp, synthetic construct
  source 1..20: mol_type = other DNA
  modified_base 1: mod_base = OTHER; note = 2'-O-methoxyethyl modified nucleotide with phosphorothioate linkage
  modified_base 2: mod_base = OTHER; note = 2'-O-methoxyethyl 5-methylcytosine with phosphorothioate linkage
  modified_base 3: mod_base = OTHER; note = 2'-O-methoxyethyl modified nucleotide with phosphorothioate linkage
  modified_base 4: mod_base = OTHER; note = 2'-O-methoxyethyl modified nucleotide with phosphorothioate linkage
  modified_base 5: mod_base = OTHER; note = 2'-O-methoxyethyl modified nucleotide with phosphorothioate linkage
  modified_base 6: mod_base = OTHER; note = Nucleotide with phosphorothioate linkage
  modified_base 7: mod_base = OTHER; note = Nucleotide with phosphorothioate linkage
  modified_base 8: mod_base = OTHER; note = Thymine with phosphorothioate linkage
  modified_base 9: mod_base = OTHER; note = Nucleotide with phosphorothioate linkage
  modified_base 10: mod_base = OTHER; note = Nucleotide with phosphorothioate linkage
  modified_base 11: mod_base = OTHER; note = 2'-O-methyl modified abasic nucleotide with phosphorothioate linkage
  modified_base 12: mod_base = OTHER; note = Nucleotide with phosphorothioate linkage
  modified_base 13: mod_base = OTHER; note = 5-methylcytosine with phosphorothioate linkage
  modified_base 14: mod_base = OTHER; note = Nucleotide with phosphorothioate linkage
  modified_base 15: mod_base = OTHER; note = Nucleotide with phosphorothioate linkage
  modified_base 16: mod_base = OTHER; note = 2'-O-methoxyethyl modified nucleotide with phosphorothioate linkage
  modified_base 17: mod_base = OTHER; note = 2'-O-methoxyethyl modified nucleotide with phosphorothioate linkage
  modified_base 18: mod_base = OTHER; note = 2'-O-methoxyethyl modified thymine with phosphorothioate linkage
  modified_base 19: mod_base = OTHER; note = 2'-O-methoxyethyl modified nucleotide with phosphorothioate linkage
  modified_base 20: mod_base = OTHER; note = 2'-O-methoxyethyl 5-methylcytosine
  misc_feature 1..5: note = RNA
  misc_feature 6..10: note = DNA
  misc_feature 11: note = RNA
  misc_feature 12..15: note = DNA
  misc_feature 16..20: note = RNA
gcagaggtgangcgaagtgc

SEQ ID NO: 1188 - DNA, 20 bp, synthetic construct
  source 1..20: mol_type = other DNA
  modified_base 1: mod_base = OTHER; note = 2'-O-methoxyethyl modified nucleotide with phosphorothioate linkage
  modified_base 2: mod_base = OTHER; note = 2'-O-methoxyethyl 5-methylcytosine with phosphorothioate linkage
  modified_base 3: mod_base = OTHER; note = Locked nucleic acid with phosphorothioate linkage
  modified_base 4: mod_base = OTHER; note = 2'-O-methoxyethyl modified nucleotide with phosphorothioate linkage
  modified_base 5: mod_base = OTHER; note = Locked nucleic acid with phosphorothioate linkage
  modified_base 6: mod_base = OTHER; note = Nucleotide with phosphorothioate linkage
  modified_base 7: mod_base = OTHER; note = Nucleotide with phosphorothioate linkage
  modified_base 8: mod_base = OTHER; note = Thymine with phosphorothioate linkage
  modified_base 9: mod_base = OTHER; note = Nucleotide with phosphorothioate linkage
  modified_base 10: mod_base = OTHER; note = Nucleotide with phosphorothioate linkage
  modified_base 11: mod_base = OTHER; note = Abasic nucleotide with a phosphorothioate linkage
  modified_base 12: mod_base = OTHER; note = Nucleotide with phosphorothioate linkage
  modified_base 13: mod_base = OTHER; note = 5-methylcytosine with phosphorothioate linkage
  modified_base 14: mod_base = OTHER; note = Nucleotide with phosphorothioate linkage
  modified_base 15: mod_base = OTHER; note = Nucleotide with phosphorothioate linkage
  modified_base 16: mod_base = OTHER; note = 2'-O-methoxyethyl modified nucleotide with phosphorothioate linkage
  modified_base 17: mod_base = OTHER; note = 2'-O-methoxyethyl modified nucleotide with phosphorothioate linkage
  modified_base 18: mod_base = OTHER; note = 2'-O-methoxyethyl modified thymine with phosphorothioate linkage
  modified_base 19: mod_base = OTHER; note = 2'-O-methoxyethyl modified nucleotide with phosphorothioate linkage
  modified_base 20: mod_base = OTHER; note = 2'-O-methoxyethyl 5-methylcytosine
  misc_feature 1..5: note = RNA
  misc_feature 6..15: note = DNA
  misc_feature 16..20: note = RNA
gcagaggtgangcgaagtgc

SEQ ID NO: 1189 - DNA, 20 bp, synthetic construct
  source 1..20: mol_type = other DNA
  modified_base 1: mod_base = OTHER; note = 2'-O-methoxyethyl modified nucleotide with phosphorothioate linkage
  modified_base 2: mod_base = OTHER; note = 2'-O-methoxyethyl 5-methylcytosine with phosphorothioate linkage
  modified_base 3: mod_base = OTHER; note = 2'-O-methoxyethyl modified nucleotide with phosphorothioate linkage
  modified_base 4: mod_base = OTHER; note = Locked nucleic acid with phosphorothioate linkage
  modified_base 5: mod_base = OTHER; note = Locked nucleic acid with phosphorothioate linkage
  modified_base 6: mod_base = OTHER; note = Nucleotide with phosphorothioate linkage
  modified_base 7: mod_base = OTHER; note = Nucleotide with phosphorothioate linkage
  modified_base 8: mod_base = OTHER; note = Thymine with phosphorothioate linkage
  modified_base 9: mod_base = OTHER; note = Nucleotide with phosphorothioate linkage
  modified_base 10: mod_base = OTHER; note = Nucleotide with phosphorothioate linkage
  modified_base 11: mod_base = OTHER; note = Abasic nucleotide with a phosphorothioate linkage
  modified_base 12: mod_base = OTHER; note = Nucleotide with phosphorothioate linkage
  modified_base 13: mod_base = OTHER; note = 5-methylcytosine with phosphorothioate linkage
  modified_base 14: mod_base = OTHER; note = Nucleotide with phosphorothioate linkage
  modified_base 15: mod_base = OTHER; note = Nucleotide with phosphorothioate linkage
  modified_base 16: mod_base = OTHER; note = 2'-O-methoxyethyl modified nucleotide with phosphorothioate linkage
  modified_base 17: mod_base = OTHER; note = 2'-O-methoxyethyl modified nucleotide with phosphorothioate linkage
  modified_base 18: mod_base = OTHER; note = 2'-O-methoxyethyl modified thymine with phosphorothioate linkage
  modified_base 19: mod_base = OTHER; note = 2'-O-methoxyethyl modified nucleotide with phosphorothioate linkage
  modified_base 20: mod_base = OTHER; note = 2'-O-methoxyethyl 5-methylcytosine
  misc_feature 1..5: note = RNA
  misc_feature 6..15: note = DNA
  misc_feature 16..20: note = RNA
gcagaggtgangcgaagtgc

SEQ ID NO: 1190 - DNA, 20 bp, synthetic construct
  source 1..20: mol_type = other DNA
  modified_base 1: mod_base = OTHER; note = 2'-O-methoxyethyl modified nucleotide with phosphorothioate linkage
  modified_base 2: mod_base = OTHER; note = 2'-O-methoxyethyl 5-methylcytosine with phosphorothioate linkage
  modified_base 3: mod_base = OTHER; note = 2'-O-methoxyethyl modified nucleotide with phosphorothioate linkage
  modified_base 4: mod_base = OTHER; note = Locked nucleic acid with phosphorothioate linkage
  modified_base 5: mod_base = OTHER; note = 2'-O-methoxyethyl modified nucleotide with phosphorothioate linkage
  modified_base 6: mod_base = OTHER; note = Nucleotide with phosphorothioate linkage
  modified_base 7: mod_base = OTHER; note = Nucleotide with phosphorothioate linkage
  modified_base 8: mod_base = OTHER; note = Thymine with phosphorothioate linkage
  modified_base 9: mod_base = OTHER; note = Nucleotide with phosphorothioate linkage
  modified_base 10: mod_base = OTHER; note = Nucleotide with phosphorothioate linkage
  modified_base 11: mod_base = OTHER; note = Abasic nucleotide with a phosphorothioate linkage
  modified_base 12: mod_base = OTHER; note = Nucleotide with phosphorothioate linkage
  modified_base 13: mod_base = OTHER; note = 5-methylcytosine with phosphorothioate linkage
  modified_base 14: mod_base = OTHER; note = Nucleotide with phosphorothioate linkage
  modified_base 15: mod_base = OTHER; note = Nucleotide with phosphorothioate linkage
  modified_base 16: mod_base = OTHER; note = Locked nucleic acid with phosphorothioate linkage
  modified_base 17: mod_base = OTHER; note = 2'-O-methoxyethyl modified nucleotide with phosphorothioate linkage
  modified_base 18: mod_base = OTHER; note = 2'-O-methoxyethyl modified thymine with phosphorothioate linkage
  modified_base 19: mod_base = OTHER; note = 2'-O-methoxyethyl modified nucleotide with phosphorothioate linkage
  modified_base 20: mod_base = OTHER; note = 2'-O-methoxyethyl 5-methylcytosine
  misc_feature 1..5: note = RNA
  misc_feature 6..15: note = DNA
  misc_feature 16..20: note = RNA
gcagaggtgangcgaagtgc

SEQ ID NO: 1191 - DNA, 20 bp, synthetic construct
  source 1..20: mol_type = other DNA
  modified_base 1: mod_base = OTHER; note = 2'-O-methoxyethyl modified nucleotide with phosphorothioate linkage
  modified_base 2: mod_base = OTHER; note = 2'-O-methoxyethyl 5-methylcytosine with phosphorothioate linkage
  modified_base 3: mod_base = OTHER; note = 2'-O-methoxyethyl modified nucleotide with phosphorothioate linkage
  modified_base 4: mod_base = OTHER; note = 2'-O-methoxyethyl modified nucleotide with phosphorothioate linkage
  modified_base 5: mod_base = OTHER; note = Locked nucleic acid with phosphorothioate linkage
  modified_base 6: mod_base = OTHER; note = Nucleotide with phosphorothioate linkage
  modified_base 7: mod_base = OTHER; note = Nucleotide with phosphorothioate linkage
  modified_base 8: mod_base = OTHER; note = Thymine with phosphorothioate linkage
  modified_base 9: mod_base = OTHER; note = Nucleotide with phosphorothioate linkage
  modified_base 10: mod_base = OTHER; note = Nucleotide with phosphorothioate linkage
  modified_base 11: mod_base = OTHER; note = Abasic nucleotide with a phosphorothioate linkage
  modified_base 12: mod_base = OTHER; note = Nucleotide with phosphorothioate linkage
  modified_base 13: mod_base = OTHER; note = 5-methylcytosine with phosphorothioate linkage
  modified_base 14: mod_base = OTHER; note = Nucleotide with phosphorothioate linkage
  modified_base 15: mod_base = OTHER; note = Nucleotide with phosphorothioate linkage
  modified_base 16: mod_base = OTHER; note = Locked nucleic acid with phosphorothioate linkage
  modified_base 17: mod_base = OTHER; note = 2'-O-methoxyethyl modified nucleotide with phosphorothioate linkage
  modified_base 18: mod_base = OTHER; note = 2'-O-methoxyethyl modified thymine with phosphorothioate linkage
  modified_base 19: mod_base = OTHER; note = 2'-O-methoxyethyl modified nucleotide with phosphorothioate linkage
  modified_base 20: mod_base = OTHER; note = 2'-O-methoxyethyl 5-methylcytosine
  misc_feature 1..5: note = RNA
  misc_feature 6..15: note = DNA
  misc_feature 16..20: note = RNA
gcagaggtgangcgaagtgc

SEQ ID NO: 1192 - DNA, 20 bp, synthetic construct
  source 1..20: mol_type = other DNA
  modified_base 1: mod_base = OTHER; note = 2'-O-methoxyethyl modified nucleotide with phosphorothioate linkage
  modified_base 2: mod_base = OTHER; note = 2'-O-methoxyethyl 5-methylcytosine with phosphorothioate linkage
  modified_base 3: mod_base = OTHER; note = 2'-O-methoxyethyl modified nucleotide with phosphorothioate linkage
  modified_base 4: mod_base = OTHER; note = 2'-O-methoxyethyl modified nucleotide with phosphorothioate linkage
  modified_base 5: mod_base = OTHER; note = Locked nucleic acid with phosphorothioate linkage
  modified_base 6: mod_base = OTHER; note = Nucleotide with phosphorothioate linkage
  modified_base 7: mod_base = OTHER; note = Nucleotide with phosphorothioate linkage
  modified_base 8: mod_base = OTHER; note = Thymine with phosphorothioate linkage
  modified_base 9: mod_base = OTHER; note = Nucleotide with phosphorothioate linkage
  modified_base 10: mod_base = OTHER; note = Nucleotide with phosphorothioate linkage
  modified_base 11: mod_base = OTHER; note = Abasic nucleotide with a phosphorothioate linkage
  modified_base 12: mod_base = OTHER; note = Nucleotide with phosphorothioate linkage
  modified_base 13: mod_base = OTHER; note = 5-methylcytosine with phosphorothioate linkage
  modified_base 14: mod_base = OTHER; note = Nucleotide with phosphorothioate linkage
  modified_base 15: mod_base = OTHER; note = Nucleotide with phosphorothioate linkage
  modified_base 16: mod_base = OTHER; note = 2'-O-methoxyethyl modified nucleotide with phosphorothioate linkage
  modified_base 17: mod_base = OTHER; note = 2'-O-methoxyethyl modified nucleotide with phosphorothioate linkage
  modified_base 18: mod_base = OTHER; note = 2'-O-methoxyethyl modified thymine with phosphorothioate linkage
  modified_base 19: mod_base = OTHER; note = Locked nucleic acid with phosphorothioate linkage
  modified_base 20: mod_base = OTHER; note = 2'-O-methoxyethyl 5-methylcytosine
  misc_feature 1..5: note = RNA
  misc_feature 6..15: note = DNA
  misc_feature 16..20: note = RNA
gcagaggtgangcgaagtgc

SEQ ID NO: 1193 - DNA, 20 bp, synthetic construct
  source 1..20: mol_type = other DNA
  modified_base 1: mod_base = OTHER; note = 2'-O-methoxyethyl modified nucleotide with phosphorothioate linkage
  modified_base 2: mod_base = OTHER; note = 2'-O-methoxyethyl 5-methylcytosine with phosphorothioate linkage
  modified_base 3: mod_base = OTHER; note = 2'-O-methoxyethyl modified nucleotide with phosphorothioate linkage
  modified_base 4: mod_base = OTHER; note = 2'-O-methoxyethyl modified nucleotide with phosphorothioate linkage
  modified_base 5: mod_base = OTHER; note = 2'-O-methoxyethyl modified nucleotide with phosphorothioate linkage
  modified_base 6: mod_base = OTHER; note = Nucleotide with phosphorothioate linkage
  modified_base 7: mod_base = OTHER; note = Nucleotide with phosphorothioate linkage
  modified_base 8: mod_base = OTHER; note = Thymine with phosphorothioate linkage
  modified_base 9: mod_base = OTHER; note = Nucleotide with phosphorothioate linkage
  modified_base 10: mod_base = OTHER; note = Nucleotide with phosphorothioate linkage
  modified_base 11: mod_base = OTHER; note = Abasic nucleotide with a phosphorothioate linkage
  modified_base 12: mod_base = OTHER; note = Nucleotide with phosphorothioate linkage
  modified_base 13: mod_base = OTHER; note = 5-methylcytosine with phosphorothioate linkage
  modified_base 14: mod_base = OTHER; note = Nucleotide with phosphorothioate linkage
  modified_base 15: mod_base = OTHER; note = Nucleotide with phosphorothioate linkage
  modified_base 16: mod_base = OTHER; note = Locked nucleic acid with phosphorothioate linkage
  modified_base 17: mod_base = OTHER; note = 2'-O-methoxyethyl modified nucleotide with phosphorothioate linkage
  modified_base 18: mod_base = OTHER; note = Locked thymine with phosphorothioate linkage
  modified_base 19: mod_base = OTHER; note = 2'-O-methoxyethyl modified nucleotide with phosphorothioate linkage
  modified_base 20: mod_base = OTHER; note = 2'-O-methoxyethyl 5-methylcytosine
  misc_feature 1..5: note = RNA
  misc_feature 6..15: note = DNA
  misc_feature 16..20: note = RNA
gcagaggtgangcgaagtgc

SEQ ID NO: 1194 - DNA, 20 bp, synthetic construct
  source 1..20: mol_type = other DNA
  modified_base 1: mod_base = OTHER; note = 2'-O-methoxyethyl modified nucleotide with phosphorothioate linkage
  modified_base 2: mod_base = OTHER; note = 2'-O-methoxyethyl 5-methylcytosine with phosphorothioate linkage
  modified_base 3: mod_base = OTHER; note = 2'-O-methoxyethyl modified nucleotide with phosphorothioate linkage
  modified_base 4: mod_base = OTHER; note = 2'-O-methoxyethyl modified nucleotide with phosphorothioate linkage
  modified_base 5: mod_base = OTHER; note = 2'-O-methoxyethyl modified nucleotide with phosphorothioate linkage
  modified_base 6: mod_base = OTHER; note = Nucleotide with phosphorothioate linkage
  modified_base 7: mod_base = OTHER; note = Nucleotide with phosphorothioate linkage
  modified_base 8: mod_base = OTHER; note = Thymine with phosphorothioate linkage
  modified_base 9: mod_base = OTHER; note = 2'-O-methyl-3'-xylo modified nucleotide with phosphorothioate linkage
  modified_base 10: mod_base = OTHER; note = Nucleotide with phosphorothioate linkage
  modified_base 11: mod_base = OTHER; note = Nucleotide with phosphorothioate linkage
  modified_base 12: mod_base = OTHER; note = Nucleotide with phosphorothioate linkage
  modified_base 13: mod_base = OTHER; note = 5-methylcytosine with phosphorothioate linkage
  modified_base 14: mod_base = OTHER; note = Nucleotide with phosphorothioate linkage
  modified_base 15: mod_base = OTHER; note = Nucleotide with phosphorothioate linkage
  modified_base 16: mod_base = OTHER; note = 2'-O-methoxyethyl modified nucleotide with phosphorothioate linkage
  modified_base 17: mod_base = OTHER; note = 2'-O-methoxyethyl modified nucleotide with phosphorothioate linkage
  modified_base 18: mod_base = OTHER; note = 2'-O-methoxyethyl modified thymine with phosphorothioate linkage
  modified_base 19: mod_base = OTHER; note = 2'-O-methoxyethyl modified nucleotide with phosphorothioate linkage
  modified_base 20: mod_base = OTHER; note = 2'-O-methoxyethyl 5-methylcytosine
  misc_feature 1..5: note = RNA
  misc_feature 6..8: note = DNA
  misc_feature 9: note = RNA
  misc_feature 10..15: note = DNA
  misc_feature 16..20: note = RNA
gcagaggtcaagcgaagtgc

SEQ ID NO: 1195 - DNA, 20 bp, synthetic construct
  source 1..20: mol_type = other DNA
  modified_base 1: mod_base = OTHER; note = 2'-O-methoxyethyl modified nucleotide with phosphorothioate linkage
  modified_base 2: mod_base = OTHER; note = 2'-O-methoxyethyl 5-methylcytosine with phosphorothioate linkage
  modified_base 3: mod_base = OTHER; note = 2'-O-methoxyethyl modified nucleotide with phosphorothioate linkage
  modified_base 4: mod_base = OTHER; note = 2'-O-methoxyethyl modified nucleotide with phosphorothioate linkage
  modified_base 5: mod_base = OTHER; note = 2'-O-methoxyethyl modified nucleotide with phosphorothioate linkage
  modified_base 6: mod_base = OTHER; note = Nucleotide with phosphorothioate linkage
  modified_base 7: mod_base = OTHER; note = Nucleotide with phosphorothioate linkage
  modified_base 8: mod_base = OTHER; note = Thymine with phosphorothioate linkage
  modified_base 9: mod_base = OTHER; note = 2'-O-methyl-3'-xylo modified nucleotide with phosphorothioate linkage
  modified_base 10: mod_base = OTHER; note = Nucleotide with phosphorothioate linkage
  modified_base 11: mod_base = OTHER; note = Nucleotide with phosphorothioate linkage
  modified_base 12: mod_base = OTHER; note = Nucleotide with phosphorothioate linkage
  modified_base 13: mod_base = OTHER; note = 5-methylcytosine with phosphorothioate linkage
  modified_base 14: mod_base = OTHER; note = Nucleotide with phosphorothioate linkage
  modified_base 15: mod_base = OTHER; note = Nucleotide with phosphorothioate linkage
  modified_base 16: mod_base = OTHER; note = 2'-O-methoxyethyl modified nucleotide with phosphorothioate linkage
  modified_base 17: mod_base = OTHER; note = 2'-O-methoxyethyl modified nucleotide with phosphorothioate linkage
  modified_base 18: mod_base = OTHER; note = 2'-O-methoxyethyl modified thymine with phosphorothioate linkage
  modified_base 19: mod_base = OTHER; note = 2'-O-methoxyethyl modified nucleotide with phosphorothioate linkage
  modified_base 20: mod_base = OTHER; note = 2'-O-methoxyethyl 5-methylcytosine
  misc_feature 1..5: note = RNA
  misc_feature 6..8: note = DNA
  misc_feature 9: note = RNA
  misc_feature 10..15: note = DNA
  misc_feature 16..20: note = RNA
gcagaggttaagcgaagtgc

SEQ ID NO: 1196 - DNA, 20 bp, synthetic construct
  source 1..20: mol_type = other DNA
  modified_base 1: mod_base = OTHER; note = 2'-O-methoxyethyl modified nucleotide with phosphorothioate linkage
  modified_base 2: mod_base = OTHER; note = 2'-O-methoxyethyl 5-methylcytosine with phosphorothioate linkage
  modified_base 3: mod_base = OTHER; note = 2'-O-methoxyethyl modified nucleotide with phosphorothioate linkage
  modified_base 4: mod_base = OTHER; note = 2'-O-methoxyethyl modified nucleotide with phosphorothioate linkage
  modified_base 5: mod_base = OTHER; note = 2'-O-methoxyethyl modified nucleotide with phosphorothioate linkage
  modified_base 6: mod_base = OTHER; note = Nucleotide with phosphorothioate linkage
  modified_base 7: mod_base = OTHER; note = Nucleotide with phosphorothioate linkage
  modified_base 8: mod_base = OTHER; note = Thymine with phosphorothioate linkage
  modified_base 9: mod_base = OTHER; note = Nucleotide with phosphorothioate linkage
  modified_base 10: mod_base = OTHER; note = 2'-O-methyl-3'-xylo modified nucleotide with phosphorothioate linkage
  modified_base 11: mod_base = OTHER; note = Nucleotide with phosphorothioate linkage
  modified_base 12: mod_base = OTHER; note = Nucleotide with phosphorothioate linkage
  modified_base 13: mod_base = OTHER; note = 5-methylcytosine with phosphorothioate linkage
  modified_base 14: mod_base = OTHER; note = Nucleotide with phosphorothioate linkage
  modified_base 15: mod_base = OTHER; note = Nucleotide with phosphorothioate linkage
  modified_base 16: mod_base = OTHER; note = 2'-O-methoxyethyl modified nucleotide with phosphorothioate linkage
  modified_base 17: mod_base = OTHER; note = 2'-O-methoxyethyl modified nucleotide with phosphorothioate linkage
  modified_base 18: mod_base = OTHER; note = 2'-O-methoxyethyl modified thymine with phosphorothioate linkage
  modified_base 19: mod_base = OTHER; note = 2'-O-methoxyethyl modified nucleotide with phosphorothioate linkage
  modified_base 20: mod_base = OTHER; note = 2'-O-methoxyethyl 5-methylcytosine
  misc_feature 1..5: note = RNA
  misc_feature 6..9: note = DNA
  misc_feature 10: note = RNA
  misc_feature 11..15: note = DNA
  misc_feature 16..20: note = RNA
gcagaggtggagcgaagtgc

SEQ ID NO: 1197 - DNA, 20 bp, synthetic construct
  source 1..20: mol_type = other DNA
  modified_base 1: mod_base = OTHER; note = 2'-O-methoxyethyl modified nucleotide with phosphorothioate linkage
  modified_base 2: mod_base = OTHER; note = 2'-O-methoxyethyl 5-methylcytosine with phosphorothioate linkage
  modified_base 3: mod_base = OTHER; note = 2'-O-methoxyethyl modified nucleotide with phosphorothioate linkage
  modified_base 4: mod_base = OTHER; note = 2'-O-methoxyethyl modified nucleotide with phosphorothioate linkage
  modified_base 5: mod_base = OTHER; note = 2'-O-methoxyethyl modified nucleotide with phosphorothioate linkage
  modified_base 6: mod_base = OTHER; note = Nucleotide with phosphorothioate linkage
  modified_base 7: mod_base = OTHER; note = Nucleotide with phosphorothioate linkage
  modified_base 8: mod_base = OTHER; note = Thymine with phosphorothioate linkage
  modified_base 9: mod_base = OTHER; note = Nucleotide with phosphorothioate linkage
  modified_base 10: mod_base = OTHER; note = Nucleotide with phosphorothioate linkage
  modified_base 11: mod_base = OTHER; note = 2'-O-methyl-3'-xylo modified nucleotide with phosphorothioate linkage
  modified_base 12: mod_base = OTHER; note = Nucleotide with phosphorothioate linkage
  modified_base 13: mod_base = OTHER; note = 5-methylcytosine with phosphorothioate linkage
  modified_base 14: mod_base = OTHER; note = Nucleotide with phosphorothioate linkage
  modified_base 15: mod_base = OTHER; note = Nucleotide with phosphorothioate linkage
  modified_base 16: mod_base = OTHER; note = 2'-O-methoxyethyl modified nucleotide with phosphorothioate linkage
  modified_base 17: mod_base = OTHER; note = 2'-O-methoxyethyl modified nucleotide with phosphorothioate linkage
  modified_base 18: mod_base = OTHER; note = 2'-O-methoxyethyl modified thymine with phosphorothioate linkage
  modified_base 19: mod_base = OTHER; note = 2'-O-methoxyethyl modified nucleotide with phosphorothioate linkage
  modified_base 20: mod_base = OTHER; note = 2'-O-methoxyethyl 5-methylcytosine
  misc_feature 1..5: note = RNA
  misc_feature 6..10: note = DNA
  misc_feature 11: note = RNA
  misc_feature 12..15: note = DNA
  misc_feature 16..20: note = RNA
gcagaggtgatgcgaagtgc

SEQ ID NO: 1198 - DNA, 20 bp, synthetic construct
  source 1..20: mol_type = other DNA
  modified_base 1: mod_base = OTHER; note = 2'-O-methoxyethyl modified nucleotide with phosphorothioate linkage
  modified_base 2: mod_base = OTHER; note = 2'-O-methoxyethyl 5-methylcytosine with phosphorothioate linkage
  modified_base 3: mod_base = OTHER; note = 2'-O-methoxyethyl modified nucleotide with phosphorothioate linkage
  modified_base 4: mod_base = OTHER; note = 2'-O-methoxyethyl modified nucleotide with phosphorothioate linkage
  modified_base 5: mod_base = OTHER; note = 2'-O-methoxyethyl modified nucleotide with phosphorothioate linkage
  modified_base 6: mod_base = OTHER; note = Nucleotide with phosphorothioate linkage
  modified_base 7: mod_base = OTHER; note = Nucleotide with phosphorothioate linkage
  modified_base 8: mod_base = OTHER; note = Thymine with phosphorothioate linkage
  modified_base 9: mod_base = OTHER; note = Nucleotide with phosphorothioate linkage
  modified_base 10: mod_base = OTHER; note = Nucleotide with phosphorothioate linkage
  modified_base 11: mod_base = OTHER; note = Nucleotide with phosphorothioate linkage
  modified_base 12: mod_base = OTHER; note = 2'-O-methyl-3'-xylo modified nucleotide with phosphorothioate linkage
  modified_base 13: mod_base = OTHER; note = 5-methylcytosine with phosphorothioate linkage
  modified_base 14: mod_base = OTHER; note = Nucleotide with phosphorothioate linkage
  modified_base 15: mod_base = OTHER; note = Nucleotide with phosphorothioate linkage
  modified_base 16: mod_base = OTHER; note = 2'-O-methoxyethyl modified nucleotide with phosphorothioate linkage
  modified_base 17: mod_base = OTHER; note = 2'-O-methoxyethyl modified nucleotide with phosphorothioate linkage
  modified_base 18: mod_base = OTHER; note = 2'-O-methoxyethyl modified thymine with phosphorothioate linkage
  modified_base 19: mod_base = OTHER; note = 2'-O-methoxyethyl modified nucleotide with phosphorothioate linkage
  modified_base 20: mod_base = OTHER; note = 2'-O-methoxyethyl 5-methylcytosine
  misc_feature 1..5: note = RNA
  misc_feature 6..11: note = DNA
  misc_feature 12: note = RNA
  misc_feature 13..15: note = DNA
  misc_feature 16..20: note = RNA
gcagaggtgaaccgaagtgc

SEQ ID NO: 1199 - DNA, 20 bp, synthetic construct
  source 1..20: mol_type = other DNA
  modified_base 1: mod_base = OTHER; note = 2'-O-methoxyethyl modified nucleotide with phosphorothioate linkage
  modified_base 2: mod_base = OTHER; note = 2'-O-methoxyethyl 5-methylcytosine with phosphorothioate linkage
  modified_base 3: mod_base = OTHER; note = 2'-O-methoxyethyl modified nucleotide with phosphorothioate linkage
  modified_base 4: mod_base = OTHER; note = 2'-O-methoxyethyl modified nucleotide with phosphorothioate linkage
  modified_base 5: mod_base = OTHER; note = 2'-O-methoxyethyl modified nucleotide with phosphorothioate linkage
  modified_base 6: mod_base = OTHER; note = Nucleotide with phosphorothioate linkage
  modified_base 7: mod_base = OTHER; note = Nucleotide with phosphorothioate linkage
  modified_base 8: mod_base = OTHER; note = Thymine with phosphorothioate linkage
  modified_base 9: mod_base = OTHER; note = Nucleotide with phosphorothioate linkage
  modified_base 10: mod_base = OTHER; note = Nucleotide with phosphorothioate linkage
  modified_base 11: mod_base = OTHER; note = Nucleotide with phosphorothioate linkage
  modified_base 12: mod_base = OTHER; note = 2'-O-methyl-3'-xylo modified nucleotide with phosphorothioate linkage
  modified_base 13: mod_base = OTHER; note = 5-methylcytosine with phosphorothioate linkage
  modified_base 14: mod_base = OTHER; note = Nucleotide with phosphorothioate linkage
  modified_base 15: mod_base = OTHER; note = Nucleotide with phosphorothioate linkage
  modified_base 16: mod_base = OTHER; note = 2'-O-methoxyethyl modified nucleotide with phosphorothioate linkage
  modified_base 17: mod_base = OTHER; note = 2'-O-methoxyethyl modified nucleotide with phosphorothioate linkage
  modified_base 18: mod_base = OTHER; note = 2'-O-methoxyethyl modified thymine with phosphorothioate linkage
  modified_base 19: mod_base = OTHER; note = 2'-O-methoxyethyl modified nucleotide with phosphorothioate linkage
  modified_base 20: mod_base = OTHER; note = 2'-O-methoxyethyl 5-methylcytosine
  misc_feature 1..5: note = RNA
  misc_feature 6..11: note = DNA
  misc_feature 12: note = RNA
  misc_feature 13..15: note = DNA
  misc_feature 16..20: note = RNA
gcagaggtgaatcgaagtgc

SEQ ID NO: 1200 - DNA, 20 bp, synthetic construct
  source 1..20: mol_type = other DNA
  modified_base 1: mod_base = OTHER; note = 2'-O-methoxyethyl modified nucleotide with phosphorothioate linkage
  modified_base 2: mod_base = OTHER; note = 2'-O-methoxyethyl 5-methylcytosine with phosphorothioate linkage
  modified_base 3: mod_base = OTHER; note = 2'-O-methoxyethyl modified nucleotide with phosphorothioate linkage
  modified_base 4: mod_base = OTHER; note = 2'-O-methoxyethyl modified nucleotide with phosphorothioate linkage
  modified_base 5: mod_base = OTHER; note = 2'-O-methoxyethyl modified nucleotide with phosphorothioate linkage
  modified_base 6: mod_base = OTHER; note = Nucleotide with phosphorothioate linkage
  modified_base 7: mod_base = OTHER; note = Nucleotide with phosphorothioate linkage
  modified_base 8: mod_base = OTHER; note = Thymine with phosphorothioate linkage
  modified_base 9: mod_base = OTHER; note = Nucleotide with phosphorothioate linkage
  modified_base 10: mod_base = OTHER; note = Nucleotide with phosphorothioate linkage
  modified_base 11: mod_base = OTHER; note = 2'-O-methyl modified abasic nucleotide with phosphorothioate linkage
  modified_base 12: mod_base = OTHER; note = Nucleotide with phosphorothioate linkage
  modified_base 13: mod_base = OTHER; note = 5-methylcytosine with phosphorothioate linkage
  modified_base 14: mod_base = OTHER; note = Nucleotide with phosphorothioate linkage
  modified_base 15: mod_base = OTHER; note = Nucleotide with phosphorothioate linkage
  modified_base 16: mod_base = OTHER; note = 2'-O-methoxyethyl modified nucleotide with phosphorothioate linkage
  modified_base 17: mod_base = OTHER; note = 2'-O-methoxyethyl modified nucleotide with phosphorothioate linkage
  modified_base 18: mod_base = OTHER; note = Locked thymine with phosphorothioate linkage
  modified_base 19: mod_base = OTHER; note = 2'-O-methoxyethyl modified nucleotide with phosphorothioate linkage
  modified_base 20: mod_base = OTHER; note = Locked 5-methylcytosine
  misc_feature 1..5: note = RNA
  misc_feature 6..10: note = DNA
  misc_feature 11: note = RNA
  misc_feature 12..15: note = DNA
  misc_feature 16..20: note = RNA
gcagaggtgangcgaagtgc

SEQ ID NO: 1201 - DNA, 20 bp, synthetic construct
  source 1..20: mol_type = other DNA
  modified_base 1: mod_base = OTHER; note = 2'-O-methoxyethyl modified nucleotide with phosphorothioate linkage
  modified_base 2: mod_base = OTHER; note = 2'-O-methoxyethyl 5-methylcytosine with phosphorothioate linkage
  modified_base 3: mod_base = OTHER; note = 2'-O-methoxyethyl modified nucleotide with phosphorothioate linkage
  modified_base 4: mod_base = OTHER; note = 2'-O-methoxyethyl modified nucleotide with phosphorothioate linkage
  modified_base 5: mod_base = OTHER; note = 2'-O-methoxyethyl modified nucleotide with phosphorothioate linkage
  modified_base 6: mod_base = OTHER; note = Nucleotide with phosphorothioate linkage
  modified_base 7: mod_base = OTHER; note = Nucleotide with phosphorothioate linkage
  modified_base 8: mod_base = OTHER; note = Thymine with phosphorothioate linkage
  modified_base 9: mod_base = OTHER; note = Nucleotide with phosphorothioate linkage
  modified_base 10: mod_base = OTHER; note = Nucleotide with phosphorothioate linkage
  modified_base 11: mod_base = OTHER; note = Nucleotide with phosphorothioate linkage
  modified_base 12: mod_base = OTHER; note = Thymine with phosphorothioate linkage
  modified_base 13: mod_base = OTHER; note = 5-methylcytosine with phosphorothioate linkage
  modified_base 14: mod_base = OTHER; note = Nucleotide with phosphorothioate linkage
  modified_base 15: mod_base = OTHER; note = Nucleotide with phosphorothioate linkage
  modified_base 16: mod_base = OTHER; note = Locked nucleic acid with phosphorothioate linkage
  modified_base 17: mod_base = OTHER; note = 2'-O-methoxyethyl modified nucleotide with phosphorothioate linkage
  modified_base 18: mod_base = OTHER; note = Locked thymine with phosphorothioate linkage
  modified_base 19: mod_base = OTHER; note = 2'-O-methoxyethyl modified nucleotide with phosphorothioate linkage
  modified_base 20: mod_base = OTHER; note = 2'-O-methoxyethyl 5-methylcytosine
  misc_feature 1..5: note = RNA
  misc_feature 6..15: note = DNA
  misc_feature 16..20: note = RNA
gcagaggtgaatcgaagtgc

SEQ ID NO: 1202 - DNA, 20 bp, synthetic construct
  source 1..20: mol_type = other DNA
  modified_base 1: mod_base = OTHER; note = 2'-O-methoxyethyl modified nucleotide with phosphorothioate linkage
  modified_base 2: mod_base = OTHER; note = 2'-O-methoxyethyl 5-methylcytosine with phosphorothioate linkage
  modified_base 3: mod_base = OTHER; note = 2'-O-methoxyethyl modified nucleotide with phosphorothioate linkage
  modified_base 4: mod_base = OTHER; note = 2'-O-methoxyethyl modified nucleotide with phosphorothioate linkage
  modified_base 5: mod_base = OTHER; note = 2'-O-methoxyethyl modified nucleotide with phosphorothioate linkage
  modified_base 6: mod_base = OTHER; note = Nucleotide with phosphorothioate linkage
  modified_base 7: mod_base = OTHER; note = Nucleotide with phosphorothioate linkage
  modified_base 8: mod_base = OTHER; note = Thymine with phosphorothioate linkage
  modified_base 9: mod_base = OTHER; note = Nucleotide with phosphorothioate linkage
  modified_base 10: mod_base = OTHER; note = Nucleotide with phosphorothioate linkage
  modified_base 11: mod_base = OTHER; note = 2'-O-methyl modified abasic nucleotide with phosphorothioate linkage
  modified_base 12: mod_base = OTHER; note = Nucleotide with phosphorothioate linkage
  modified_base 13: mod_base = OTHER; note = 5-methylcytosine with phosphorothioate linkage
  modified_base 14: mod_base = OTHER; note = Nucleotide with phosphorothioate linkage
  modified_base 15: mod_base = OTHER; note = Nucleotide with phosphorothioate linkage
  modified_base 16: mod_base = OTHER; note = 2'-O-methoxyethyl modified nucleotide with phosphorothioate linkage
  modified_base 17: mod_base = OTHER; note = 2'-O-methoxyethyl modified nucleotide with phosphorothioate linkage
  modified_base 18: mod_base = OTHER; note = Locked thymine with phosphorothioate linkage
  modified_base 19: mod_base = OTHER; note = Locked nucleic acid with phosphorothioate linkage
  modified_base 20: mod_base = OTHER; note = 2'-O-methoxyethyl 5-methylcytosine
  misc_feature 1..5: note = RNA
  misc_feature 6..10: note = DNA
  misc_feature 11: note = RNA
  misc_feature 12..15: note = DNA
  misc_feature 16..20: note = RNA
gcagaggtgangcgaagtgc

SEQ ID NO: 1203 - DNA, 20 bp, synthetic construct
  source 1..20: mol_type = other DNA
  modified_base 1: mod_base = OTHER; note = 2'-O-methoxyethyl 5-methylcytosine with phosphorothioate linkage
  modified_base 2: mod_base = OTHER; note = 2'-O-methoxyethyl modified nucleotide with phosphorothioate linkage
  modified_base 3: mod_base = OTHER; note = 2'-O-methoxyethyl modified nucleotide with phosphorothioate linkage
  modified_base 4: mod_base = OTHER; note = 2'-O-methoxyethyl modified nucleotide with phosphorothioate linkage
  modified_base 5: mod_base = OTHER; note = 2'-O-methoxyethyl modified nucleotide with phosphorothioate linkage
  modified_base 6: mod_base = OTHER; note = Nucleotide with phosphorothioate linkage
  modified_base 7: mod_base = OTHER; note = Thymine with phosphorothioate linkage
  modified_base 8: mod_base = OTHER; note = Nucleotide with phosphorothioate linkage
  modified_base 9: mod_base = OTHER; note = Nucleotide with phosphorothioate linkage
  modified_base 10: mod_base = OTHER; note = Nucleotide with phosphorothioate linkage
  modified_base 11: mod_base = OTHER; note = Nucleotide with phosphorothioate linkage
  modified_base 12: mod_base = OTHER; note = 5-methylcytosine with phosphorothioate linkage
  modified_base 13: mod_base = OTHER; note = Nucleotide with phosphorothioate linkage
  modified_base 14: mod_base = OTHER; note = Nucleotide with phosphorothioate linkage
  modified_base 15: mod_base = OTHER; note = Nucleotide with phosphorothioate linkage
  modified_base 16: mod_base = OTHER; note = 2'-O-methyl modified nucleotide with S-stereo-defined phosphorothioate linkage
  modified_base 17: mod_base = OTHER; note = 2'-O-methoxyethyl modified thymine with phosphorothioate linkage
  modified_base 18: mod_base = OTHER; note = 2'-O-methyl modified nucleotide with phosphorothioate linkage
  modified_base 19: mod_base = OTHER; note = 2'-O-methoxyethyl 5-methylcytosine with phosphorothioate linkage
  modified_base 20: mod_base = OTHER; note = 2'-O-methyl modified nucleotide
  misc_feature 1..5: note = RNA
  misc_feature 6..15: note = DNA
  misc_feature 16..20: note = RNA
cagaggtgaagcgaagtgca

SEQ ID NO: 1204 - DNA, 20 bp, synthetic construct
  source 1..20: mol_type = other DNA
  modified_base 1: mod_base = OTHER; note = 2'-O-methoxyethyl 5-methylcytosine with phosphorothioate linkage
  modified_base 2: mod_base = OTHER; note = 2'-O-methoxyethyl modified nucleotide with phosphorothioate linkage
  modified_base 3: mod_base = OTHER; note = 2'-O-methoxyethyl modified nucleotide with phosphorothioate linkage
  modified_base 4: mod_base = OTHER; note = 2'-O-methoxyethyl modified nucleotide with phosphorothioate linkage
  modified_base 5: mod_base = OTHER; note = 2'-O-methoxyethyl modified nucleotide with phosphorothioate linkage
  modified_base 6: mod_base = OTHER; note = Nucleotide with phosphorothioate linkage
  modified_base 7: mod_base = OTHER; note = Thymine with phosphorothioate linkage
  modified_base 8: mod_base = OTHER; note = Nucleotide with phosphorothioate linkage
  modified_base 9: mod_base = OTHER; note = Nucleotide with phosphorothioate linkage
  modified_base 10: mod_base = OTHER; note = Nucleotide with phosphorothioate linkage
  modified_base 11: mod_base = OTHER; note = Nucleotide with phosphorothioate linkage
  modified_base 12: mod_base = OTHER; note = 5-methylcytosine with phosphorothioate linkage
  modified_base 13: mod_base = OTHER; note = Nucleotide with phosphorothioate linkage
  modified_base 14: mod_base = OTHER; note = Nucleotide with phosphorothioate linkage
  modified_base 15: mod_base = OTHER; note = Nucleotide with phosphorothioate linkage
  modified_base 16: mod_base = OTHER; note = 2'-O-methyl modified nucleotide with R-stereo-defined phosphorothioate linkage
  modified_base 17: mod_base = OTHER; note = 2'-O-methoxyethyl modified thymine with phosphorothioate linkage
  modified_base 18: mod_base = OTHER; note = 2'-O-methyl modified nucleotide with phosphorothioate linkage
  modified_base 19: mod_base = OTHER; note = 2'-O-methoxyethyl 5-methylcytosine with phosphorothioate linkage
  modified_base 20: mod_base = OTHER; note = 2'-O-methyl modified nucleotide
  misc_feature 1..5: note = RNA
  misc_feature 6..15: note = DNA
  misc_feature 16..20: note = RNA
cagaggtgaagcgaagtgca

SEQ ID NO: 1205 - DNA, 20 bp, synthetic construct
  source 1..20: mol_type = other DNA
  modified_base 1: mod_base = OTHER; note = 2'-O-methoxyethyl 5-methylcytosine with phosphorothioate linkage
  modified_base 2: mod_base = OTHER; note = 2'-O-methoxyethyl modified nucleotide with phosphorothioate linkage
  modified_base 3: mod_base = OTHER; note = 2'-O-methoxyethyl modified nucleotide with phosphorothioate linkage
  modified_base 4: mod_base = OTHER; note = 2'-O-methoxyethyl modified nucleotide with phosphorothioate linkage
  modified_base 5: mod_base = OTHER; note = 2'-O-methoxyethyl modified nucleotide with phosphorothioate linkage
  modified_base 6: mod_base = OTHER; note = Nucleotide with phosphorothioate linkage
  modified_base 7: mod_base = OTHER; note = Thymine with phosphorothioate linkage
  modified_base 8: mod_base = OTHER; note = Nucleotide with phosphorothioate linkage
  modified_base 9: mod_base = OTHER; note = Nucleotide with phosphorothioate linkage
  modified_base 10: mod_base = OTHER; note = Nucleotide with phosphorothioate linkage
  modified_base 11: mod_base = OTHER; note = Nucleotide with phosphorothioate linkage
  modified_base 12: mod_base = OTHER; note = 5-methylcytosine with phosphorothioate linkage
  modified_base 13: mod_base = OTHER; note = Nucleotide with phosphorothioate linkage
  modified_base 14: mod_base = OTHER; note = Nucleotide with phosphorothioate linkage
  modified_base 15: mod_base = OTHER; note = Nucleotide with phosphorothioate linkage
  modified_base 16: mod_base = OTHER; note = 2'-O-methyl modified nucleotide with phosphorothioate linkage
  modified_base 17: mod_base = OTHER; note = 2'-O-methoxyethyl modified thymine with phosphorothioate linkage
  modified_base 18: mod_base = OTHER; note = 2'-O-methyl modified nucleotide with S-stereo-defined phosphorothioate linkage
  modified_base 19: mod_base = OTHER; note = 2'-O-methoxyethyl 5-methylcytosine with phosphorothioate linkage
  modified_base 20: mod_base = OTHER; note = 2'-O-methyl modified nucleotide
  misc_feature 1..5: note = RNA
  misc_feature 6..15: note = DNA
  misc_feature 16..20: note = RNA
cagaggtgaagcgaagtgca

SEQ ID NO: 1206 - DNA, 20 bp, synthetic construct
  source 1..20: mol_type = other DNA
  modified_base 1: mod_base = OTHER; note = 2'-O-methoxyethyl 5-methylcytosine with phosphorothioate linkage
  modified_base 2: mod_base = OTHER; note = 2'-O-methoxyethyl modified nucleotide with phosphorothioate linkage
  modified_base 3: mod_base = OTHER; note = 2'-O-methoxyethyl modified nucleotide with phosphorothioate linkage
  modified_base 4: mod_base = OTHER; note = 2'-O-methoxyethyl modified nucleotide with phosphorothioate linkage
  modified_base 5: mod_base = OTHER; note = 2'-O-methoxyethyl modified nucleotide with phosphorothioate linkage
  modified_base 6: mod_base = OTHER; note = Nucleotide with phosphorothioate linkage
  modified_base 7: mod_base = OTHER; note = Thymine with phosphorothioate linkage
  modified_base 8: mod_base = OTHER; note = Nucleotide with phosphorothioate linkage
  modified_base 9: mod_base = OTHER; note = Nucleotide with phosphorothioate linkage
  modified_base 10: mod_base = OTHER; note = Nucleotide with phosphorothioate linkage
  modified_base 11: mod_base = OTHER; note = Nucleotide with phosphorothioate linkage
  modified_base 12: mod_base = OTHER; note = 5-methylcytosine with phosphorothioate linkage
  modified_base 13: mod_base = OTHER; note = Nucleotide with phosphorothioate linkage
  modified_base 14: mod_base = OTHER; note = Nucleotide with phosphorothioate linkage
  modified_base 15: mod_base = OTHER; note = Nucleotide with phosphorothioate linkage
  modified_base 16: mod_base = OTHER; note = 2'-O-methyl modified nucleotide with phosphorothioate linkage
  modified_base 17: mod_base = OTHER; note = 2'-O-methoxyethyl modified thymine with phosphorothioate linkage
  modified_base 18: mod_base = OTHER; note = 2'-O-methyl modified nucleotide with R-stereo-defined phosphorothioate linkage
  modified_base 19: mod_base = OTHER; note = 2'-O-methoxyethyl 5-methylcytosine with phosphorothioate linkage
  modified_base 20: mod_base = OTHER; note = 2'-O-methyl modified nucleotide
  misc_feature 1..5: note = RNA
  misc_feature 6..15: note = DNA
  misc_feature 16..20: note = RNA
cagaggtgaagcgaagtgca

SEQ ID NO: 1207 - DNA, 20 bp, synthetic construct
  source 1..20: mol_type = other DNA
  modified_base 1: mod_base = OTHER; note = 2'-O-methoxyethyl 5-methylcytosine with phosphorothioate linkage
  modified_base 2: mod_base = OTHER; note = 2'-O-methoxyethyl modified nucleotide with phosphorothioate linkage
  modified_base 3: mod_base = OTHER; note = 2'-O-methoxyethyl modified nucleotide with phosphorothioate linkage
  modified_base 4: mod_base = OTHER; note = 2'-O-methoxyethyl modified nucleotide with phosphorothioate linkage
  modified_base 5: mod_base = OTHER; note = 2'-O-methoxyethyl modified nucleotide with phosphorothioate linkage
  modified_base 6: mod_base = OTHER; note = Nucleotide with phosphorothioate linkage
  modified_base 7: mod_base = OTHER; note = Thymine with phosphorothioate linkage
  modified_base 8: mod_base = OTHER; note = Nucleotide with phosphorothioate linkage
  modified_base 9: mod_base = OTHER; note = Nucleotide with phosphorothioate linkage
  modified_base 10: mod_base = OTHER; note = Nucleotide with phosphorothioate linkage
  modified_base 11: mod_base = OTHER; note = Nucleotide with phosphorothioate linkage
  modified_base 12: mod_base = OTHER; note = 5-methylcytosine with phosphorothioate linkage
  modified_base 13: mod_base = OTHER; note = Nucleotide with phosphorothioate linkage
  modified_base 14: mod_base = OTHER; note = Nucleotide with phosphorothioate linkage
  modified_base 15: mod_base = OTHER; note = Nucleotide with phosphorothioate linkage
  modified_base 16: mod_base = OTHER; note = 2'-O-methyl modified nucleotide with S-stereo-defined phosphorothioate linkage
  modified_base 17: mod_base = OTHER; note = 2'-O-methoxyethyl modified thymine with phosphorothioate linkage
  modified_base 18: mod_base = OTHER; note = 2'-O-methyl modified nucleotide with S-stereo-defined phosphorothioate linkage
  modified_base 19: mod_base = OTHER; note = 2'-O-methoxyethyl 5-methylcytosine with phosphorothioate linkage
  modified_base 20: mod_base = OTHER; note = 2'-O-methyl modified nucleotide
  misc_feature 1..5: note = RNA
  misc_feature 6..15: note = DNA
  misc_feature 16..20: note = RNA
cagaggtgaagcgaagtgca

SEQ ID NO: 1208 - DNA, 20 bp, synthetic construct
  source 1..20: mol_type = other DNA
  modified_base 1: mod_base = OTHER; note = 2'-O-methoxyethyl 5-methylcytosine with phosphorothioate linkage
  modified_base 2: mod_base = OTHER; note = 2'-O-methoxyethyl modified nucleotide with phosphorothioate linkage
  modified_base 3: mod_base = OTHER; note = 2'-O-methoxyethyl modified nucleotide with phosphorothioate linkage
  modified_base 4: mod_base = OTHER; note = 2'-O-methoxyethyl modified nucleotide with phosphorothioate linkage
  modified_base 5: mod_base = OTHER; note = 2'-O-methoxyethyl modified nucleotide with phosphorothioate linkage
  modified_base 6: mod_base = OTHER; note = Nucleotide with phosphorothioate linkage
  modified_base 7: mod_base = OTHER; note = Thymine with phosphorothioate linkage
  modified_base 8: mod_base = OTHER; note = Nucleotide with phosphorothioate linkage
  modified_base 9: mod_base = OTHER; note = Nucleotide with phosphorothioate linkage
  modified_base 10: mod_base = OTHER; note = Nucleotide with phosphorothioate linkage
  modified_base 11: mod_base = OTHER; note = Nucleotide with phosphorothioate linkage
  modified_base 12: mod_base = OTHER; note = 5-methylcytosine with phosphorothioate linkage
  modified_base 13: mod_base = OTHER; note = Nucleotide with phosphorothioate linkage
  modified_base 14: mod_base = OTHER; note = Nucleotide with phosphorothioate linkage
  modified_base 15: mod_base = OTHER; note = Nucleotide with phosphorothioate linkage
  modified_base 16: mod_base = OTHER; note = 2'-O-methyl modified nucleotide with R-stereo-defined phosphorothioate linkage
  modified_base 17: mod_base = OTHER; note = 2'-O-methoxyethyl modified thymine with phosphorothioate linkage
  modified_base 18: mod_base = OTHER; note = 2'-O-methyl modified nucleotide with R-stereo-defined phosphorothioate linkage
  modified_base 19: mod_base = OTHER; note = 2'-O-methoxyethyl 5-methylcytosine with phosphorothioate linkage
  modified_base 20: mod_base = OTHER; note = 2'-O-methyl modified nucleotide
  misc_feature 1..5: note = RNA
  misc_feature 6..15: note = DNA
  misc_feature 16..20: note = RNA
cagaggtgaagcgaagtgca

SEQ ID NO: 1209 - DNA, 20 bp, synthetic construct
  source 1..20: mol_type = other DNA
  modified_base 1: mod_base = OTHER; note = 2'-O-methoxyethyl 5-methylcytosine with phosphorothioate linkage
  modified_base 2: mod_base = OTHER; note = 2'-O-methoxyethyl modified nucleotide with phosphorothioate linkage
  modified_base 3: mod_base = OTHER; note = 2'-O-methoxyethyl modified nucleotide with phosphorothioate linkage
  modified_base 4: mod_base = OTHER; note = 2'-O-methoxyethyl modified nucleotide with phosphorothioate linkage
  modified_base 5: mod_base = OTHER; note = 2'-O-methoxyethyl modified nucleotide with phosphorothioate linkage
  modified_base 6: mod_base = OTHER; note = Nucleotide with phosphorothioate linkage
  modified_base 7: mod_base = OTHER; note = Thymine with phosphorothioate linkage
  modified_base 8: mod_base = OTHER; note = Nucleotide with phosphorothioate linkage
  modified_base 9: mod_base = OTHER; note = Nucleotide with phosphorothioate linkage
  modified_base 10: mod_base = OTHER; note = Nucleotide with phosphorothioate linkage
  modified_base 11: mod_base = OTHER; note = Nucleotide with phosphorothioate linkage
  modified_base 12: mod_base = OTHER; note = 5-methylcytosine with phosphorothioate linkage
  modified_base 13: mod_base = OTHER; note = Nucleotide with phosphorothioate linkage
  modified_base 14: mod_base = OTHER; note = Nucleotide with phosphorothioate linkage
  modified_base 15: mod_base = OTHER; note = Nucleotide with phosphorothioate linkage
  modified_base 16: mod_base = OTHER; note = 2'-O-methyl modified nucleotide with S-stereo-defined phosphorothioate linkage
  modified_base 17: mod_base = OTHER; note = 2'-O-methoxyethyl modified thymine with phosphorothioate linkage
  modified_base 18: mod_base = OTHER; note = 2'-O-methyl modified nucleotide with R-stereo-defined phosphorothioate linkage
  modified_base 19: mod_base = OTHER; note = 2'-O-methoxyethyl 5-methylcytosine with phosphorothioate linkage
  modified_base 20: mod_base = OTHER; note = 2'-O-methyl modified nucleotide
  misc_feature 1..5: note = RNA
  misc_feature 6..15: note = DNA
  misc_feature 16..20: note = RNA
cagaggtgaagcgaagtgca

SEQ ID NO: 1210 - DNA, 20 bp, synthetic construct
  source 1..20: mol_type = other DNA
  modified_base 1: mod_base = OTHER; note = 2'-O-methoxyethyl 5-methylcytosine with phosphorothioate linkage
  modified_base 2: mod_base = OTHER; note = 2'-O-methoxyethyl modified nucleotide with phosphorothioate linkage
  modified_base 3: mod_base = OTHER; note = 2'-O-methoxyethyl modified nucleotide with phosphorothioate linkage
  modified_base 4: mod_base = OTHER; note = 2'-O-methoxyethyl modified nucleotide with phosphorothioate linkage
  modified_base 5: mod_base = OTHER; note = 2'-O-methoxyethyl modified nucleotide with phosphorothioate linkage
  modified_base 6: mod_base = OTHER; note = Nucleotide with phosphorothioate linkage
  modified_base 7: mod_base = OTHER; note = Thymine with phosphorothioate linkage
  modified_base 8: mod_base = OTHER; note = Nucleotide with phosphorothioate linkage
  modified_base 9: mod_base = OTHER; note = Nucleotide with phosphorothioate linkage
  modified_base 10: mod_base = OTHER; note = Nucleotide with phosphorothioate linkage
  modified_base 11: mod_base = OTHER; note = Nucleotide with phosphorothioate linkage
  modified_base 12: mod_base = OTHER; note = 5-methylcytosine with phosphorothioate linkage
  modified_base 13: mod_base = OTHER; note = Nucleotide with phosphorothioate linkage
  modified_base 14: mod_base = OTHER; note = Nucleotide with phosphorothioate linkage
  modified_base 15: mod_base = OTHER; note = Nucleotide with phosphorothioate linkage
  modified_base 16: mod_base = OTHER; note = 2'-O-methyl modified nucleotide with R-stereo-defined phosphorothioate linkage
  modified_base 17: mod_base = OTHER; note = 2'-O-methoxyethyl modified thymine with phosphorothioate linkage
  modified_base 18: mod_base = OTHER; note = 2'-O-methyl modified nucleotide with S-stereo-defined phosphorothioate linkage
  modified_base 19: mod_base = OTHER; note = 2'-O-methoxyethyl 5-methylcytosine with phosphorothioate linkage
  modified_base 20: mod_base = OTHER; note = 2'-O-methyl modified nucleotide
  misc_feature 1..5: note = RNA
  misc_feature 6..15: note = DNA
  misc_feature 16..20: note = RNA
cagaggtgaagcgaagtgca

SEQ ID NO: 1211 - DNA, 20 bp, synthetic construct
  source 1..20: mol_type = other DNA
  modified_base 1: mod_base = OTHER; note = 2'-O-methoxyethyl modified nucleotide with phosphorothioate linkage
  modified_base 2: mod_base = OTHER; note = 2'-O-methoxyethyl modified nucleotide with phosphorothioate linkage
  modified_base 3: mod_base = OTHER; note = 2'-O-methoxyethyl modified nucleotide with phosphorothioate linkage
  modified_base 4: mod_base = OTHER; note = 2'-O-methoxyethyl modified nucleotide with phosphorothioate linkage
  modified_base 5: mod_base = OTHER; note = Nucleotide with phosphorothioate linkage
  modified_base 6: mod_base = OTHER; note = Nucleotide with phosphorothioate linkage
  modified_base 7: mod_base = OTHER; note = Nucleotide with phosphorothioate linkage
  modified_base 8: mod_base = OTHER; note = Thymine with phosphorothioate linkage
  modified_base 9: mod_base = OTHER; note = Nucleotide with phosphorothioate linkage
  modified_base 10: mod_base = OTHER; note = 2'-O-methoxyethyl modified nucleotide with phosphorothioate linkage
  modified_base 11: mod_base = OTHER; note = Nucleotide with phosphorothioate linkage
  modified_base 12: mod_base = OTHER; note = Nucleotide with phosphorothioate linkage
  modified_base 13: mod_base = OTHER; note = Nucleotide with phosphorothioate linkage
  modified_base 14: mod_base = OTHER; note = Nucleotide with phosphorothioate linkage
  modified_base 15: mod_base = OTHER; note = Nucleotide with phosphorothioate linkage
  modified_base 16: mod_base = OTHER; note = 2'-O-methoxyethyl modified nucleotide with phosphorothioate linkage
  modified_base 17: mod_base = OTHER; note = Locked nucleic acid with phosphorothioate linkage
  modified_base 18: mod_base = OTHER; note = 2'-O-methoxyethyl modified thymine with phosphorothioate linkage
  modified_base 19: mod_base = OTHER; note = Locked nucleic acid with phosphorothioate linkage
  modified_base 20: mod_base = OTHER; note = Locked nucleic acid
  misc_feature 1..4: note = RNA
  misc_feature 5..9: note = DNA
  misc_feature 10: note = RNA
  misc_feature 11..15: note = DNA
  misc_feature 16..20: note = RNA
gcagaggtgaagcgaaatgc

SEQ ID NO: 1212 - DNA, 20 bp, synthetic construct
  source 1..20: mol_type = other DNA
  modified_base 1: mod_base = OTHER; note = 2'-O-methoxyethyl modified nucleotide with phosphorothioate linkage
  modified_base 2: mod_base = OTHER; note = 2'-O-methoxyethyl 5-methylcytosine with phosphorothioate linkage
  modified_base 3: mod_base = OTHER; note = 2'-O-methoxyethyl modified nucleotide with phosphorothioate linkage
  modified_base 4: mod_base = OTHER; note = 2'-O-methoxyethyl modified nucleotide with phosphorothioate linkage
  modified_base 5: mod_base = OTHER; note = Locked nucleic acid with phosphorothioate linkage
  modified_base 6: mod_base = OTHER; note = Nucleotide with phosphorothioate linkage
  modified_base 7: mod_base = OTHER; note = Nucleotide with phosphorothioate linkage
  modified_base 8: mod_base = OTHER; note = Thymine with phosphorothioate linkage
  modified_base 9: mod_base = OTHER; note = Nucleotide with phosphorothioate linkage
  modified_base 10: mod_base = OTHER; note = Nucleotide with phosphorothioate linkage
  modified_base 11: mod_base = OTHER; note = Abasic nucleotide with a phosphorothioate linkage
  modified_base 12: mod_base = OTHER; note = Nucleotide with phosphorothioate linkage
  modified_base 13: mod_base = OTHER; note = 5-methylcytosine with phosphorothioate linkage
  modified_base 14: mod_base = OTHER; note = Nucleotide with phosphorothioate linkage
  modified_base 15: mod_base = OTHER; note = Nucleotide with phosphorothioate linkage
  modified_base 16: mod_base = OTHER; note = 2'-O-methoxyethyl modified nucleotide with phosphorothioate linkage
  modified_base 17: mod_base = OTHER; note = 2'-O-methoxyethyl modified nucleotide with phosphorothioate linkage
  modified_base 18: mod_base = OTHER; note = Locked thymine with phosphorothioate linkage
  modified_base 19: mod_base = OTHER; note = 2'-O-methoxyethyl modified nucleotide with phosphorothioate linkage
  modified_base 20: mod_base = OTHER; note = 2'-O-methoxyethyl 5-methylcytosine
  misc_feature 1..5: note = RNA
  misc_feature 6..15: note = DNA
  misc_feature 16..20: note = RNA
gcagaggtgangcgaagtgc

SEQ ID NO: 1213 - DNA, 20 bp, synthetic construct
  source 1..20: mol_type = other DNA
  modified_base 1: mod_base = OTHER; note = 2'-O-methoxyethyl modified nucleotide with phosphorothioate linkage
  modified_base 2: mod_base = OTHER; note = 2'-O-methoxyethyl 5-methylcytosine with phosphorothioate linkage
  modified_base 3: mod_base = OTHER; note = 2'-O-methoxyethyl modified nucleotide with phosphorothioate linkage
  modified_base 4: mod_base = OTHER; note = 2'-O-methoxyethyl modified nucleotide with phosphorothioate linkage
  modified_base 5: mod_base = OTHER; note = 2'-O-methoxyethyl modified nucleotide with phosphorothioate linkage
  modified_base 6: mod_base = OTHER; note = Nucleotide with phosphorothioate linkage
  modified_base 7: mod_base = OTHER; note = Nucleotide with phosphorothioate linkage
  modified_base 8: mod_base = OTHER; note = Thymine with phosphorothioate linkage
  modified_base 9: mod_base = OTHER; note = Nucleotide with phosphorothioate linkage
  modified_base 10: mod_base = OTHER; note = Nucleotide with phosphorothioate linkage
  modified_base 11: mod_base = OTHER; note = Abasic nucleotide with a phosphorothioate linkage
  modified_base 12: mod_base = OTHER; note = Nucleotide with phosphorothioate linkage
  modified_base 13: mod_base = OTHER; note = 5-methylcytosine with phosphorothioate linkage
  modified_base 14: mod_base = OTHER; note = Nucleotide with phosphorothioate linkage
  modified_base 15: mod_base = OTHER; note = Nucleotide with phosphorothioate linkage
  modified_base 16: mod_base = OTHER; note = 2'-O-methoxyethyl modified nucleotide with phosphorothioate linkage
  modified_base 17: mod_base = OTHER; note = 2'-O-methoxyethyl modified nucleotide with phosphorothioate linkage
  modified_base 18: mod_base = OTHER; note = Locked thymine with phosphorothioate linkage
  modified_base 19: mod_base = OTHER; note = Locked nucleic acid with phosphorothioate linkage
  modified_base 20: mod_base = OTHER; note = 2'-O-methoxyethyl 5-methylcytosine
  misc_feature 1..5: note = RNA
  misc_feature 6..15: note = DNA
  misc_feature 16..20: note = RNA
gcagaggtgangcgaagtgc

SEQ ID NO: 1214 - DNA, 20 bp, synthetic construct
  source 1..20: mol_type = other DNA
  modified_base 1: mod_base = OTHER; note = 2'-O-methoxyethyl modified nucleotide with phosphorothioate linkage
  modified_base 2: mod_base = OTHER; note = 2'-O-methoxyethyl 5-methylcytosine with phosphorothioate linkage
  modified_base 3: mod_base = OTHER; note = 2'-O-methoxyethyl modified nucleotide with phosphorothioate linkage
  modified_base 4: mod_base = OTHER; note = 2'-O-methoxyethyl modified nucleotide with phosphorothioate linkage
  modified_base 5: mod_base = OTHER; note = 2'-O-methoxyethyl modified nucleotide with phosphorothioate linkage
  modified_base 6: mod_base = OTHER; note = Nucleotide with phosphorothioate linkage
  modified_base 7: mod_base = OTHER; note = Nucleotide with phosphorothioate linkage
  modified_base 8: mod_base = OTHER; note = Thymine with phosphorothioate linkage
  modified_base 9: mod_base = OTHER; note = Nucleotide with phosphorothioate linkage
  modified_base 10: mod_base = OTHER; note = Nucleotide with phosphorothioate linkage
  modified_base 11: mod_base = OTHER; note = Abasic nucleotide with a phosphorothioate linkage
  modified_base 12: mod_base = OTHER; note = Nucleotide with phosphorothioate linkage
  modified_base 13: mod_base = OTHER; note = 5-methylcytosine with phosphorothioate linkage
  modified_base 14: mod_base = OTHER; note = Nucleotide with phosphorothioate linkage
  modified_base 15: mod_base = OTHER; note = Nucleotide with phosphorothioate linkage
  modified_base 16: mod_base = OTHER; note = 2'-O-methoxyethyl modified nucleotide with phosphorothioate linkage
  modified_base 17: mod_base = OTHER; note = 2'-O-methoxyethyl modified nucleotide with phosphorothioate linkage
  modified_base 18: mod_base = OTHER; note = Locked thymine with phosphorothioate linkage
  modified_base 19: mod_base = OTHER; note = 2'-O-methoxyethyl modified nucleotide with phosphorothioate linkage
  modified_base 20: mod_base = OTHER; note = Locked 5-methylcytosine
  misc_feature 1..5: note = RNA
  misc_feature 6..15: note = DNA
  misc_feature 16..20: note = RNA
gcagaggtgangcgaagtgc

SEQ ID NO: 1215 - DNA, 20 bp, synthetic construct
  source 1..20: mol_type = other DNA
  modified_base 1: mod_base = OTHER; note = 2'-O-methoxyethyl modified nucleotide with phosphorothioate linkage
  modified_base 2: mod_base = OTHER; note = 2'-O-methoxyethyl 5-methylcytosine with phosphorothioate linkage
  modified_base 3: mod_base = OTHER; note = Locked nucleic acid with phosphorothioate linkage
  modified_base 4: mod_base = OTHER; note = 2'-O-methoxyethyl modified nucleotide with phosphorothioate linkage
  modified_base 5: mod_base = OTHER; note = 2'-O-methoxyethyl modified nucleotide with phosphorothioate linkage
  modified_base 6: mod_base = OTHER; note = Nucleotide with phosphorothioate linkage
  modified_base 7: mod_base = OTHER; note = Nucleotide with phosphorothioate linkage
  modified_base 8: mod_base = OTHER; note = Thymine with phosphorothioate linkage
  modified_base 9: mod_base = OTHER; note = Nucleotide with phosphorothioate linkage
  modified_base 10: mod_base = OTHER; note = Nucleotide with phosphorothioate linkage
  modified_base 11: mod_base = OTHER; note = 2'-O-methyl modified abasic nucleotide with phosphorothioate linkage
  modified_base 12: mod_base = OTHER; note = Nucleotide with phosphorothioate linkage
  modified_base 13: mod_base = OTHER; note = 5-methylcytosine with phosphorothioate linkage
  modified_base 14: mod_base = OTHER; note = Nucleotide with phosphorothioate linkage
  modified_base 15: mod_base = OTHER; note = Nucleotide with phosphorothioate linkage
  modified_base 16: mod_base = OTHER; note = 2'-O-methoxyethyl modified nucleotide with phosphorothioate linkage
  modified_base 17: mod_base = OTHER; note = 2'-O-methoxyethyl modified nucleotide with phosphorothioate linkage
  modified_base 18: mod_base = OTHER; note = Locked thymine with phosphorothioate linkage
  modified_base 19: mod_base = OTHER; note = 2'-O-methoxyethyl modified nucleotide with phosphorothioate linkage
  modified_base 20: mod_base = OTHER; note = 2'-O-methoxyethyl 5-methylcytosine
  misc_feature 1..5: note = RNA
  misc_feature 6..10: note = DNA
  misc_feature 11: note = RNA
  misc_feature 12..15: note = DNA
  misc_feature 16..20: note = RNA
gcagaggtgangcgaagtgc

SEQ ID NO: 1216 - DNA, 20 bp, synthetic construct
  source 1..20: mol_type = other DNA
  modified_base 1: mod_base = OTHER; note = 2'-O-methoxyethyl modified nucleotide with phosphorothioate linkage
  modified_base 2: mod_base = OTHER; note = 2'-O-methoxyethyl 5-methylcytosine with phosphorothioate linkage
  modified_base 3: mod_base = OTHER; note = 2'-O-methoxyethyl modified nucleotide with phosphorothioate linkage
  modified_base 4: mod_base = OTHER; note = 2'-O-methoxyethyl modified nucleotide with phosphorothioate linkage
  modified_base 5: mod_base = OTHER; note = 2'-O-methoxyethyl modified nucleotide with phosphorothioate linkage
  modified_base 6: mod_base = OTHER; note = Nucleotide with phosphorothioate linkage
  modified_base 7: mod_base = OTHER; note = Nucleotide with phosphorothioate linkage
  modified_base 8: mod_base = OTHER; note = Thymine with phosphorothioate linkage
  modified_base 9: mod_base = OTHER; note = Nucleotide with phosphorothioate linkage
  modified_base 10: mod_base = OTHER; note = Thymine with phosphorothioate linkage
  modified_base 11: mod_base = OTHER; note = Nucleotide with phosphorothioate linkage
  modified_base 12: mod_base = OTHER; note = Nucleotide with phosphorothioate linkage
  modified_base 13: mod_base = OTHER; note = 5-methylcytosine with phosphorothioate linkage
  modified_base 14: mod_base = OTHER; note = Nucleotide with phosphorothioate linkage
  modified_base 15: mod_base = OTHER; note = Nucleotide with phosphorothioate linkage
  modified_base 16: mod_base = OTHER; note = 2'-O-methoxyethyl modified nucleotide with phosphorothioate linkage
  modified_base 17: mod_base = OTHER; note = 2'-O-methoxyethyl modified nucleotide with phosphorothioate linkage
  modified_base 18: mod_base = OTHER; note = 2'-O-methoxyethyl modified thymine with phosphorothioate linkage
  modified_base 19: mod_base = OTHER; note = 2'-O-methoxyethyl modified nucleotide with phosphorothioate linkage
  modified_base 20: mod_base = OTHER; note = 2'-O-methoxyethyl 5-methylcytosine
  misc_feature 1..5: note = RNA
  misc_feature 6..15: note = DNA
  misc_feature 16..20: note = RNA
gcagaggtgtagcgaagtgc

SEQ ID NO: 1217 - DNA, 20 bp, synthetic construct
  source 1..20: mol_type = other DNA
  modified_base 1: mod_base = OTHER; note = 2'-O-methoxyethyl modified nucleotide with phosphorothioate linkage
  modified_base 2: mod_base = OTHER; note = Locked 5-methylcytosine with phosphorothioate linkage
  modified_base 3: mod_base = OTHER; note = 2'-O-methoxyethyl modified nucleotide with phosphorothioate linkage
  modified_base 4: mod_base = OTHER; note = 2'-O-methoxyethyl modified nucleotide with phosphorothioate linkage
  modified_base 5: mod_base = OTHER; note = 2'-O-methoxyethyl modified nucleotide with phosphorothioate linkage
  modified_base 6: mod_base = OTHER; note = Nucleotide with phosphorothioate linkage
  modified_base 7: mod_base = OTHER; note = Nucleotide with phosphorothioate linkage
  modified_base 8: mod_base = OTHER; note = Thymine with phosphorothioate linkage
  modified_base 9: mod_base = OTHER; note = Nucleotide with phosphorothioate linkage
  modified_base 10: mod_base = OTHER; note = Nucleotide with phosphorothioate linkage
  modified_base 11: mod_base = OTHER; note = Abasic nucleotide with a phosphorothioate linkage
  modified_base 12: mod_base = OTHER; note = Nucleotide with phosphorothioate linkage
  modified_base 13: mod_base = OTHER; note = 5-methylcytosine with phosphorothioate linkage
  modified_base 14: mod_base = OTHER; note = Nucleotide with phosphorothioate linkage
  modified_base 15: mod_base = OTHER; note = Nucleotide with phosphorothioate linkage
  modified_base 16: mod_base = OTHER; note = Locked nucleic acid with phosphorothioate linkage
  modified_base 17: mod_base = OTHER; note = 2'-O-methoxyethyl modified nucleotide with phosphorothioate linkage
  modified_base 18: mod_base = OTHER; note = 2'-O-methoxyethyl modified thymine with phosphorothioate linkage
  modified_base 19: mod_base = OTHER; note = 2'-O-methoxyethyl modified nucleotide with phosphorothioate linkage
  modified_base 20: mod_base = OTHER; note = 2'-O-methoxyethyl 5-methylcytosine
  misc_feature 1..5: note = RNA
  misc_feature 6..15: note = DNA
  misc_feature 16..20: note = RNA
gcagaggtgangcgaagtgc

SEQ ID NO: 1218 - DNA, 20 bp, synthetic construct
  source 1..20: mol_type = other DNA
  modified_base 1: mod_base = OTHER; note = 2'-O-methoxyethyl modified nucleotide with phosphorothioate linkage
  modified_base 2: mod_base = OTHER; note = 2'-O-methoxyethyl 5-methylcytosine with phosphorothioate linkage
  modified_base 3: mod_base = OTHER; note = Locked nucleic acid with phosphorothioate linkage
  modified_base 4: mod_base = OTHER; note = 2'-O-methoxyethyl modified nucleotide with phosphorothioate linkage
  modified_base 5: mod_base = OTHER; note = 2'-O-methoxyethyl modified nucleotide with phosphorothioate linkage
  modified_base 6: mod_base = OTHER; note = Nucleotide with phosphorothioate linkage
  modified_base 7: mod_base = OTHER; note = Nucleotide with phosphorothioate linkage
  modified_base 8: mod_base = OTHER; note = Thymine with phosphorothioate linkage
  modified_base 9: mod_base = OTHER; note = Nucleotide with phosphorothioate linkage
  modified_base 10: mod_base = OTHER; note = Nucleotide with phosphorothioate linkage
  modified_base 11: mod_base = OTHER; note = Abasic nucleotide with a phosphorothioate linkage
  modified_base 12: mod_base = OTHER; note = Nucleotide with phosphorothioate linkage
  modified_base 13: mod_base = OTHER; note = 5-methylcytosine with phosphorothioate linkage
  modified_base 14: mod_base = OTHER; note = Nucleotide with phosphorothioate linkage
  modified_base 15: mod_base = OTHER; note = Nucleotide with phosphorothioate linkage
  modified_base 16: mod_base = OTHER; note = 2'-O-methoxyethyl modified nucleotide with phosphorothioate linkage
  modified_base 17: mod_base = OTHER; note = 2'-O-methoxyethyl modified nucleotide with phosphorothioate linkage
  modified_base 18: mod_base = OTHER; note = Locked thymine with phosphorothioate linkage
  modified_base 19: mod_base = OTHER; note = 2'-O-methoxyethyl modified nucleotide with phosphorothioate linkage
  modified_base 20: mod_base = OTHER; note = 2'-O-methoxyethyl 5-methylcytosine
  misc_feature 1..5: note = RNA
  misc_feature 6..15: note = DNA
  misc_feature 16..20: note = RNA
gcagaggtgangcgaagtgc

SEQ ID NO: 1219 - DNA, 20 bp, synthetic construct
  source 1..20: mol_type = other DNA
  modified_base 1: mod_base = OTHER; note = 2'-O-methoxyethyl modified nucleotide with phosphorothioate linkage
  modified_base 2: mod_base = OTHER; note = 2'-O-methoxyethyl 5-methylcytosine with phosphorothioate linkage
  modified_base 3: mod_base = OTHER; note = 2'-O-methoxyethyl modified nucleotide with phosphorothioate linkage
  modified_base 4: mod_base = OTHER; note = 2'-O-methoxyethyl modified nucleotide with phosphorothioate linkage
  modified_base 5: mod_base = OTHER; note = 2'-O-methoxyethyl modified nucleotide with phosphorothioate linkage
  modified_base 6: mod_base = OTHER; note = Nucleotide with phosphorothioate linkage
  modified_base 7: mod_base = OTHER; note = Nucleotide with phosphorothioate linkage
  modified_base 8: mod_base = OTHER; note = Thymine with phosphorothioate linkage
  modified_base 9: mod_base = OTHER; note = Nucleotide with phosphorothioate linkage
  modified_base 10: mod_base = OTHER; note = Nucleotide with phosphorothioate linkage
  modified_base 11: mod_base = OTHER; note = Abasic nucleotide with a phosphorothioate linkage
  modified_base 12: mod_base = OTHER; note = Nucleotide with phosphorothioate linkage
  modified_base 13: mod_base = OTHER; note = 5-methylcytosine with phosphorothioate linkage
  modified_base 14: mod_base = OTHER; note = Nucleotide with phosphorothioate linkage
  modified_base 15: mod_base = OTHER; note = Nucleotide with phosphorothioate linkage
  modified_base 16: mod_base = OTHER; note = Locked nucleic acid with phosphorothioate linkage
  modified_base 17: mod_base = OTHER; note = 2'-O-methoxyethyl modified nucleotide with phosphorothioate linkage
  modified_base 18: mod_base = OTHER; note = 2'-O-methoxyethyl modified thymine with phosphorothioate linkage
  modified_base 19: mod_base = OTHER; note = Locked nucleic acid with phosphorothioate linkage
  modified_base 20: mod_base = OTHER; note = 2'-O-methoxyethyl 5-methylcytosine
  misc_feature 1..5: note = RNA
  misc_feature 6..15: note = DNA
  misc_feature 16..20: note = RNA
gcagaggtgangcgaagtgc

SEQ ID NO: 1220 - DNA, 20 bp, synthetic construct
  source 1..20: mol_type = other DNA
  modified_base 1: mod_base = OTHER; note = 2'-O-methoxyethyl modified nucleotide with phosphorothioate linkage
  modified_base 2: mod_base = OTHER; note = 2'-O-methoxyethyl 5-methylcytosine with phosphorothioate linkage
  modified_base 3: mod_base = OTHER; note = 2'-O-methoxyethyl modified nucleotide with phosphorothioate linkage
  modified_base 4: mod_base = OTHER; note = Locked nucleic acid with phosphorothioate linkage
  modified_base 5: mod_base = OTHER; note = 2'-O-methoxyethyl modified nucleotide with phosphorothioate linkage
  modified_base 6: mod_base = OTHER; note = Nucleotide with phosphorothioate linkage
  modified_base 7: mod_base = OTHER; note = Nucleotide with phosphorothioate linkage
  modified_base 8: mod_base = OTHER; note = Thymine with phosphorothioate linkage
  modified_base 9: mod_base = OTHER; note = Nucleotide with phosphorothioate linkage
  modified_base 10: mod_base = OTHER; note = Nucleotide with phosphorothioate linkage
  modified_base 11: mod_base = OTHER; note = Abasic nucleotide with a phosphorothioate linkage
  modified_base 12: mod_base = OTHER; note = Nucleotide with phosphorothioate linkage
  modified_base 13: mod_base = OTHER; note = 5-methylcytosine with phosphorothioate linkage
  modified_base 14: mod_base = OTHER; note = Nucleotide with phosphorothioate linkage
  modified_base 15: mod_base = OTHER; note = Nucleotide with phosphorothioate linkage
  modified_base 16: mod_base = OTHER; note = 2'-O-methoxyethyl modified nucleotide with phosphorothioate linkage
  modified_base 17: mod_base = OTHER; note = 2'-O-methoxyethyl modified nucleotide with phosphorothioate linkage
  modified_base 18: mod_base = OTHER; note = Locked thymine with phosphorothioate linkage
  modified_base 19: mod_base = OTHER; note = 2'-O-methoxyethyl modified nucleotide with phosphorothioate linkage
  modified_base 20: mod_base = OTHER; note = 2'-O-methoxyethyl 5-methylcytosine
  misc_feature 1..5: note = RNA
  misc_feature 6..15: note = DNA
  misc_feature 16..20: note = RNA
gcagaggtgangcgaagtgc

SEQ ID NO: 1221 - DNA, 20 bp, synthetic construct
  source 1..20: mol_type = other DNA
  modified_base 1: mod_base = OTHER; note = Locked nucleic acid with phosphorothioate linkage
  modified_base 2: mod_base = OTHER; note = 2'-O-methoxyethyl 5-methylcytosine with phosphorothioate linkage
  modified_base 3: mod_base = OTHER; note = 2'-O-methoxyethyl modified nucleotide with phosphorothioate linkage
  modified_base 4: mod_base = OTHER; note = 2'-O-methoxyethyl modified nucleotide with phosphorothioate linkage
  modified_base 5: mod_base = OTHER; note = 2'-O-methoxyethyl modified nucleotide with phosphorothioate linkage
  modified_base 6: mod_base = OTHER; note = Nucleotide with phosphorothioate linkage
  modified_base 7: mod_base = OTHER; note = Nucleotide with phosphorothioate linkage
  modified_base 8: mod_base = OTHER; note = Thymine with phosphorothioate linkage
  modified_base 9: mod_base = OTHER; note = Nucleotide with phosphorothioate linkage
  modified_base 10: mod_base = OTHER; note = Nucleotide with phosphorothioate linkage
  modified_base 11: mod_base = OTHER; note = Abasic nucleotide with a phosphorothioate linkage
  modified_base 12: mod_base = OTHER; note = Nucleotide with phosphorothioate linkage
  modified_base 13: mod_base = OTHER; note = 5-methylcytosine with phosphorothioate linkage
  modified_base 14: mod_base = OTHER; note = Nucleotide with phosphorothioate linkage
  modified_base 15: mod_base = OTHER; note = Nucleotide with phosphorothioate linkage
  modified_base 16: mod_base = OTHER; note = 2'-O-methoxyethyl modified nucleotide with phosphorothioate linkage
  modified_base 17: mod_base = OTHER; note = 2'-O-methoxyethyl modified nucleotide with phosphorothioate linkage
  modified_base 18: mod_base = OTHER; note = 2'-O-methoxyethyl modified thymine with phosphorothioate linkage
  modified_base 19: mod_base = OTHER; note = 2'-O-methoxyethyl modified nucleotide with phosphorothioate linkage
  modified_base 20: mod_base = OTHER; note = 2'-O-methoxyethyl 5-methylcytosine
  misc_feature 1..5: note = RNA
  misc_feature 6..15: note = DNA
  misc_feature 16..20: note = RNA
gcagaggtgangcgaagtgc

SEQ ID NO: 1222 - DNA, 20 bp, synthetic construct
  source 1..20: mol_type = other DNA
  modified_base 1: mod_base = OTHER; note = 2'-O-methoxyethyl modified nucleotide with phosphorothioate linkage
  modified_base 2: mod_base = OTHER; note = Locked 5-methylcytosine with phosphorothioate linkage
  modified_base 3: mod_base = OTHER; note = 2'-O-methoxyethyl modified nucleotide with phosphorothioate linkage
  modified_base 4: mod_base = OTHER; note = 2'-O-methoxyethyl modified nucleotide with phosphorothioate linkage
  modified_base 5: mod_base = OTHER; note = 2'-O-methoxyethyl modified nucleotide with phosphorothioate linkage
  modified_base 6: mod_base = OTHER; note = Nucleotide with phosphorothioate linkage
  modified_base 7: mod_base = OTHER; note = Nucleotide with phosphorothioate linkage
  modified_base 8: mod_base = OTHER; note = Thymine with phosphorothioate linkage
  modified_base 9: mod_base = OTHER; note = Nucleotide with phosphorothioate linkage
  modified_base 10: mod_base = OTHER; note = Nucleotide with phosphorothioate linkage
  modified_base 11: mod_base = OTHER; note = Abasic nucleotide with a phosphorothioate linkage
  modified_base 12: mod_base = OTHER; note = Nucleotide with phosphorothioate linkage
  modified_base 13: mod_base = OTHER; note = 5-methylcytosine with phosphorothioate linkage
  modified_base 14: mod_base = OTHER; note = Nucleotide with phosphorothioate linkage
  modified_base 15: mod_base = OTHER; note = Nucleotide with phosphorothioate linkage
  modified_base 16: mod_base = OTHER; note = 2'-O-methoxyethyl modified nucleotide with phosphorothioate linkage
  modified_base 17: mod_base = OTHER; note = 2'-O-methoxyethyl modified nucleotide with phosphorothioate linkage
  modified_base 18: mod_base = OTHER; note = 2'-O-methoxyethyl modified thymine with phosphorothioate linkage
  modified_base 19: mod_base = OTHER; note = 2'-O-methoxyethyl modified nucleotide with phosphorothioate linkage
  modified_base 20: mod_base = OTHER; note = 2'-O-methoxyethyl 5-methylcytosine
  misc_feature 1..5: note = RNA
  misc_feature 6..15: note = DNA
  misc_feature 16..20: note = RNA
gcagaggtgangcgaagtgc

SEQ ID NO: 1223 - DNA, 20 bp, synthetic construct
  source 1..20: mol_type = other DNA
  modified_base 1: mod_base = OTHER; note = 2'-O-methoxyethyl modified nucleotide with phosphorothioate linkage
  modified_base 2: mod_base = OTHER; note = 2'-O-methoxyethyl 5-methylcytosine with phosphorothioate linkage
  modified_base 3: mod_base = OTHER; note = Locked nucleic acid with phosphorothioate linkage
  modified_base 4: mod_base = OTHER; note = 2'-O-methoxyethyl modified nucleotide with phosphorothioate linkage
  modified_base 5: mod_base = OTHER; note = 2'-O-methoxyethyl modified nucleotide with phosphorothioate linkage
  modified_base 6: mod_base = OTHER; note = Nucleotide with phosphorothioate linkage
  modified_base 7: mod_base = OTHER; note = Nucleotide with phosphorothioate linkage
  modified_base 8: mod_base = OTHER; note = Thymine with phosphorothioate linkage
  modified_base 9: mod_base = OTHER; note = Nucleotide with phosphorothioate linkage
  modified_base 10: mod_base = OTHER; note = Nucleotide with phosphorothioate linkage
  modified_base 11: mod_base = OTHER; note = Abasic nucleotide with a phosphorothioate linkage
  modified_base 12: mod_base = OTHER; note = Nucleotide with phosphorothioate linkage
  modified_base 13: mod_base = OTHER; note = 5-methylcytosine with phosphorothioate linkage
  modified_base 14: mod_base = OTHER; note = Nucleotide with phosphorothioate linkage
  modified_base 15: mod_base = OTHER; note = Nucleotide with phosphorothioate linkage
  modified_base 16: mod_base = OTHER; note = 2'-O-methoxyethyl modified nucleotide with phosphorothioate linkage
  modified_base 17: mod_base = OTHER; note = 2'-O-methoxyethyl modified nucleotide with phosphorothioate linkage
  modified_base 18: mod_base = OTHER; note = 2'-O-methoxyethyl modified thymine with phosphorothioate linkage
  modified_base 19: mod_base = OTHER; note = 2'-O-methoxyethyl modified nucleotide with phosphorothioate linkage
  modified_base 20: mod_base = OTHER; note = 2'-O-methoxyethyl 5-methylcytosine
  misc_feature 1..5: note = RNA
  misc_feature 6..15: note = DNA
  misc_feature 16..20: note = RNA
gcagaggtgangcgaagtgc

SEQ ID NO: 1224 - DNA, 20 bp, synthetic construct
  source 1..20: mol_type = other DNA
  modified_base 1: mod_base = OTHER; note = 2'-O-methoxyethyl modified nucleotide with phosphorothioate linkage
  modified_base 2: mod_base = OTHER; note = 2'-O-methoxyethyl 5-methylcytosine with phosphorothioate linkage
  modified_base 3: mod_base = OTHER; note = 2'-O-methoxyethyl modified nucleotide with phosphorothioate linkage
  modified_base 4: mod_base = OTHER; note = Locked nucleic acid with phosphorothioate linkage
  modified_base 5: mod_base = OTHER; note = 2'-O-methoxyethyl modified nucleotide with phosphorothioate linkage
  modified_base 6: mod_base = OTHER; note = Nucleotide with phosphorothioate linkage
  modified_base 7: mod_base = OTHER; note = Nucleotide with phosphorothioate linkage
  modified_base 8: mod_base = OTHER; note = Thymine with phosphorothioate linkage
  modified_base 9: mod_base = OTHER; note = Nucleotide with phosphorothioate linkage
  modified_base 10: mod_base = OTHER; note = Nucleotide with phosphorothioate linkage
  modified_base 11: mod_base = OTHER; note = Abasic nucleotide with a phosphorothioate linkage
  modified_base 12: mod_base = OTHER; note = Nucleotide with phosphorothioate linkage
  modified_base 13: mod_base = OTHER; note = 5-methylcytosine with phosphorothioate linkage
  modified_base 14: mod_base = OTHER; note = Nucleotide with phosphorothioate linkage
  modified_base 15: mod_base = OTHER; note = Nucleotide with phosphorothioate linkage
  modified_base 16: mod_base = OTHER; note = 2'-O-methoxyethyl modified nucleotide with phosphorothioate linkage
  modified_base 17: mod_base = OTHER; note = 2'-O-methoxyethyl modified nucleotide with phosphorothioate linkage
  modified_base 18: mod_base = OTHER; note = 2'-O-methoxyethyl modified thymine with phosphorothioate linkage
  modified_base 19: mod_base = OTHER; note = 2'-O-methoxyethyl modified nucleotide with phosphorothioate linkage
  modified_base 20: mod_base = OTHER; note = 2'-O-methoxyethyl 5-methylcytosine
  misc_feature 1..5: note = RNA
  misc_feature 6..15: note = DNA
  misc_feature 16..20: note = RNA
gcagaggtgangcgaagtgc

SEQ ID NO: 1225 - DNA, 20 bp, synthetic construct
  source 1..20: mol_type = other DNA
  modified_base 1: mod_base = OTHER; note = 2'-O-methoxyethyl modified nucleotide with phosphorothioate linkage
  modified_base 2: mod_base = OTHER; note = 2'-O-methoxyethyl 5-methylcytosine with phosphorothioate linkage
  modified_base 3: mod_base = OTHER; note = 2'-O-methoxyethyl modified nucleotide with phosphorothioate linkage
  modified_base 4: mod_base = OTHER; note = 2'-O-methoxyethyl modified nucleotide with phosphorothioate linkage
  modified_base 5: mod_base = OTHER; note = Locked nucleic acid with phosphorothioate linkage
  modified_base 6: mod_base = OTHER; note = Nucleotide with phosphorothioate linkage
  modified_base 7: mod_base = OTHER; note = Nucleotide with phosphorothioate linkage
  modified_base 8: mod_base = OTHER; note = Thymine with phosphorothioate linkage
  modified_base 9: mod_base = OTHER; note = Nucleotide with phosphorothioate linkage
  modified_base 10: mod_base = OTHER; note = Nucleotide with phosphorothioate linkage
  modified_base 11: mod_base = OTHER; note = Abasic nucleotide with a phosphorothioate linkage
  modified_base 12: mod_base = OTHER; note = Nucleotide with phosphorothioate linkage
  modified_base 13: mod_base = OTHER; note = 5-methylcytosine with phosphorothioate linkage
  modified_base 14: mod_base = OTHER; note = Nucleotide with phosphorothioate linkage
  modified_base 15: mod_base = OTHER; note = Nucleotide with phosphorothioate linkage
  modified_base 16: mod_base = OTHER; note = 2'-O-methoxyethyl modified nucleotide with phosphorothioate linkage
  modified_base 17: mod_base = OTHER; note = 2'-O-methoxyethyl modified nucleotide with phosphorothioate linkage
  modified_base 18: mod_base = OTHER; note = 2'-O-methoxyethyl modified thymine with phosphorothioate linkage
  modified_base 19: mod_base = OTHER; note = 2'-O-methoxyethyl modified nucleotide with phosphorothioate linkage
  modified_base 20: mod_base = OTHER; note = 2'-O-methoxyethyl 5-methylcytosine
  misc_feature 1..5: note = RNA
  misc_feature 6..15: note = DNA
  misc_feature 16..20: note = RNA
gcagaggtgangcgaagtgc

SEQ ID NO: 1226 - DNA, 20 bp, synthetic construct
  source 1..20: mol_type = other DNA
  modified_base 1: mod_base = OTHER; note = 2'-O-methoxyethyl modified nucleotide with phosphorothioate linkage
  modified_base 2: mod_base = OTHER; note = 2'-O-methoxyethyl 5-methylcytosine with phosphorothioate linkage
  modified_base 3: mod_base = OTHER; note = 2'-O-methoxyethyl modified nucleotide with phosphorothioate linkage
  modified_base 4: mod_base = OTHER; note = 2'-O-methoxyethyl modified nucleotide with phosphorothioate linkage
  modified_base 5: mod_base = OTHER; note = 2'-O-methoxyethyl modified nucleotide with phosphorothioate linkage
  modified_base 6: mod_base = OTHER; note = Nucleotide with phosphorothioate linkage
  modified_base 7: mod_base = OTHER; note = Nucleotide with phosphorothioate linkage
  modified_base 8: mod_base = OTHER; note = Thymine with phosphorothioate linkage
  modified_base 9: mod_base = OTHER; note = Nucleotide with phosphorothioate linkage
  modified_base 10: mod_base = OTHER; note = Nucleotide with phosphorothioate linkage
  modified_base 11: mod_base = OTHER; note = Abasic nucleotide with a phosphorothioate linkage
  modified_base 12: mod_base = OTHER; note = Nucleotide with phosphorothioate linkage
  modified_base 13: mod_base = OTHER; note = 5-methylcytosine with phosphorothioate linkage
  modified_base 14: mod_base = OTHER; note = Nucleotide with phosphorothioate linkage
  modified_base 15: mod_base = OTHER; note = Nucleotide with phosphorothioate linkage
  modified_base 16: mod_base = OTHER; note = Locked nucleic acid with phosphorothioate linkage
  modified_base 17: mod_base = OTHER; note = 2'-O-methoxyethyl modified nucleotide with phosphorothioate linkage
  modified_base 18: mod_base = OTHER; note = 2'-O-methoxyethyl modified thymine with phosphorothioate linkage
  modified_base 19: mod_base = OTHER; note = 2'-O-methoxyethyl modified nucleotide with phosphorothioate linkage
  modified_base 20: mod_base = OTHER; note = 2'-O-methoxyethyl 5-methylcytosine
  misc_feature 1..5: note = RNA
  misc_feature 6..15: note = DNA
  misc_feature 16..20: note = RNA
gcagaggtgangcgaagtgc

SEQ ID NO: 1227 - DNA, 20 bp, synthetic construct
  source 1..20: mol_type = other DNA
  modified_base 1: mod_base = OTHER; note = 2'-O-methoxyethyl modified nucleotide with phosphorothioate linkage
  modified_base 2: mod_base = OTHER; note = 2'-O-methoxyethyl 5-methylcytosine with phosphorothioate linkage
  modified_base 3: mod_base = OTHER; note = 2'-O-methoxyethyl modified nucleotide with phosphorothioate linkage
  modified_base 4: mod_base = OTHER; note = 2'-O-methoxyethyl modified nucleotide with phosphorothioate linkage
  modified_base 5: mod_base = OTHER; note = 2'-O-methoxyethyl modified nucleotide with phosphorothioate linkage
  modified_base 6: mod_base = OTHER; note = Nucleotide with phosphorothioate linkage
  modified_base 7: mod_base = OTHER; note = Nucleotide with phosphorothioate linkage
  modified_base 8: mod_base = OTHER; note = Thymine with phosphorothioate linkage
  modified_base 9: mod_base = OTHER; note = Nucleotide with phosphorothioate linkage
  modified_base 10: mod_base = OTHER; note = Nucleotide with phosphorothioate linkage
  modified_base 11: mod_base = OTHER; note = Abasic nucleotide with a phosphorothioate linkage
  modified_base 12: mod_base = OTHER; note = Nucleotide with phosphorothioate linkage
  modified_base 13: mod_base = OTHER; note = 5-methylcytosine with phosphorothioate linkage
  modified_base 14: mod_base = OTHER; note = Nucleotide with phosphorothioate linkage
  modified_base 15: mod_base = OTHER; note = Nucleotide with phosphorothioate linkage
  modified_base 16: mod_base = OTHER; note = 2'-O-methoxyethyl modified nucleotide with phosphorothioate linkage
  modified_base 17: mod_base = OTHER; note = Locked nucleic acid with phosphorothioate linkage
  modified_base 18: mod_base = OTHER; note = 2'-O-methoxyethyl modified thymine with phosphorothioate linkage
  modified_base 19: mod_base = OTHER; note = 2'-O-methoxyethyl modified nucleotide with phosphorothioate linkage
  modified_base 20: mod_base = OTHER; note = 2'-O-methoxyethyl 5-methylcytosine
  misc_feature 1..5: note = RNA
  misc_feature 6..15: note = DNA
  misc_feature 16..20: note = RNA
gcagaggtgangcgaagtgc

SEQ ID NO: 1228 - DNA, 20 bp, synthetic construct
  source 1..20: mol_type = other DNA
  modified_base 1: mod_base = OTHER; note = 2'-O-methoxyethyl modified nucleotide with phosphorothioate linkage
  modified_base 2: mod_base = OTHER; note = 2'-O-methoxyethyl 5-methylcytosine with phosphorothioate linkage
  modified_base 3: mod_base = OTHER; note = 2'-O-methoxyethyl modified nucleotide with phosphorothioate linkage
  modified_base 4: mod_base = OTHER; note = 2'-O-methoxyethyl modified nucleotide with phosphorothioate linkage
  modified_base 5: mod_base = OTHER; note = 2'-O-methoxyethyl modified nucleotide with phosphorothioate linkage
  modified_base 6: mod_base = OTHER; note = Nucleotide with phosphorothioate linkage
  modified_base 7: mod_base = OTHER; note = Nucleotide with phosphorothioate linkage
  modified_base 8: mod_base = OTHER; note = Thymine with phosphorothioate linkage
  modified_base 9: mod_base = OTHER; note = Nucleotide with phosphorothioate linkage
  modified_base 10: mod_base = OTHER; note = Nucleotide with phosphorothioate linkage
  modified_base 11: mod_base = OTHER; note = Abasic nucleotide with a phosphorothioate linkage
  modified_base 12: mod_base = OTHER; note = Nucleotide with phosphorothioate linkage
  modified_base 13: mod_base = OTHER; note = 5-methylcytosine with phosphorothioate linkage
  modified_base 14: mod_base = OTHER; note = Nucleotide with phosphorothioate linkage
  modified_base 15: mod_base = OTHER; note = Nucleotide with phosphorothioate linkage
  modified_base 16: mod_base = OTHER; note = 2'-O-methoxyethyl modified nucleotide with phosphorothioate linkage
  modified_base 17: mod_base = OTHER; note = 2'-O-methoxyethyl modified nucleotide with phosphorothioate linkage
  modified_base 18: mod_base = OTHER; note = Locked thymine with phosphorothioate linkage
  modified_base 19: mod_base = OTHER; note = 2'-O-methoxyethyl modified nucleotide with phosphorothioate linkage
  modified_base 20: mod_base = OTHER; note = 2'-O-methoxyethyl 5-methylcytosine
  misc_feature 1..5: note = RNA
  misc_feature 6..15: note = DNA
  misc_feature 16..20: note = RNA
gcagaggtgangcgaagtgc

SEQ ID NO: 1229 - DNA, 20 bp, synthetic construct
  source 1..20: mol_type = other DNA
  modified_base 1: mod_base = OTHER; note = 2'-O-methoxyethyl modified nucleotide with phosphorothioate linkage
  modified_base 2: mod_base = OTHER; note = 2'-O-methoxyethyl 5-methylcytosine with phosphorothioate linkage
  modified_base 3: mod_base = OTHER; note = 2'-O-methoxyethyl modified nucleotide with phosphorothioate linkage
  modified_base 4: mod_base = OTHER; note = 2'-O-methoxyethyl modified nucleotide with phosphorothioate linkage
  modified_base 5: mod_base = OTHER; note = 2'-O-methoxyethyl modified nucleotide with phosphorothioate linkage
  modified_base 6: mod_base = OTHER; note = Nucleotide with phosphorothioate linkage
  modified_base 7: mod_base = OTHER; note = Nucleotide with phosphorothioate linkage
  modified_base 8: mod_base = OTHER; note = Thymine with phosphorothioate linkage
  modified_base 9: mod_base = OTHER; note = Nucleotide with phosphorothioate linkage
  modified_base 10: mod_base = OTHER; note = Nucleotide with phosphorothioate linkage
  modified_base 11: mod_base = OTHER; note = Abasic nucleotide with a phosphorothioate linkage
  modified_base 12: mod_base = OTHER; note = Nucleotide with phosphorothioate linkage
  modified_base 13: mod_base = OTHER; note = 5-methylcytosine with phosphorothioate linkage
  modified_base 14: mod_base = OTHER; note = Nucleotide with phosphorothioate linkage
  modified_base 15: mod_base = OTHER; note = Nucleotide with phosphorothioate linkage
  modified_base 16: mod_base = OTHER; note = 2'-O-methoxyethyl modified nucleotide with phosphorothioate linkage
  modified_base 17: mod_base = OTHER; note = 2'-O-methoxyethyl modified nucleotide with phosphorothioate linkage
  modified_base 18: mod_base = OTHER; note = 2'-O-methoxyethyl modified thymine with phosphorothioate linkage
  modified_base 19: mod_base = OTHER; note = Locked nucleic acid with phosphorothioate linkage
  modified_base 20: mod_base = OTHER; note = 2'-O-methoxyethyl 5-methylcytosine
  misc_feature 1..5: note = RNA
  misc_feature 6..15: note = DNA
  misc_feature 16..20: note = RNA
gcagaggtgangcgaagtgc

SEQ ID NO: 1230 - DNA, 20 bp, synthetic construct
  source 1..20: mol_type = other DNA
  modified_base 1: mod_base = OTHER; note = 2'-O-methoxyethyl modified nucleotide with phosphorothioate linkage
  modified_base 2: mod_base = OTHER; note = 2'-O-methoxyethyl 5-methylcytosine with phosphorothioate linkage
  modified_base 3: mod_base = OTHER; note = 2'-O-methoxyethyl modified nucleotide with phosphorothioate linkage
  modified_base 4: mod_base = OTHER; note = 2'-O-methoxyethyl modified nucleotide with phosphorothioate linkage
  modified_base 5: mod_base = OTHER; note = 2'-O-methoxyethyl modified nucleotide with phosphorothioate linkage
  modified_base 6: mod_base = OTHER; note = Nucleotide with phosphorothioate linkage
  modified_base 7: mod_base = OTHER; note = Nucleotide with phosphorothioate linkage
  modified_base 8: mod_base = OTHER; note = Thymine with phosphorothioate linkage
  modified_base 9: mod_base = OTHER; note = Nucleotide with phosphorothioate linkage
  modified_base 10: mod_base = OTHER; note = Nucleotide with phosphorothioate linkage
  modified_base 11: mod_base = OTHER; note = Abasic nucleotide with a phosphorothioate linkage
  modified_base 12: mod_base = OTHER; note = Nucleotide with phosphorothioate linkage
  modified_base 13: mod_base = OTHER; note = 5-methylcytosine with phosphorothioate linkage
  modified_base 14: mod_base = OTHER; note = Nucleotide with phosphorothioate linkage
  modified_base 15: mod_base = OTHER; note = Nucleotide with phosphorothioate linkage
  modified_base 16: mod_base = OTHER; note = 2'-O-methoxyethyl modified nucleotide with phosphorothioate linkage
  modified_base 17: mod_base = OTHER; note = 2'-O-methoxyethyl modified nucleotide with phosphorothioate linkage
  modified_base 18: mod_base = OTHER; note = 2'-O-methoxyethyl modified thymine with phosphorothioate linkage
  modified_base 19: mod_base = OTHER; note = 2'-O-methoxyethyl modified nucleotide with phosphorothioate linkage
  modified_base 20: mod_base = OTHER; note = Locked 5-methylcytosine
  misc_feature 1..5: note = RNA
  misc_feature 6..15: note = DNA
  misc_feature 16..20: note = RNA
gcagaggtgangcgaagtgc

SEQ ID NO: 1231 - DNA, 20 bp, synthetic construct
  source 1..20: mol_type = other DNA
  modified_base 1: mod_base = OTHER; note = Locked nucleic acid with phosphorothioate linkage
  modified_base 2: mod_base = OTHER; note = Locked 5-methylcytosine with phosphorothioate linkage
  modified_base 3: mod_base = OTHER; note = 2'-O-methoxyethyl modified nucleotide with phosphorothioate linkage
  modified_base 4: mod_base = OTHER; note = 2'-O-methoxyethyl modified nucleotide with phosphorothioate linkage
  modified_base 5: mod_base = OTHER; note = 2'-O-methoxyethyl modified nucleotide with phosphorothioate linkage
  modified_base 6: mod_base = OTHER; note = Nucleotide with phosphorothioate linkage
  modified_base 7: mod_base = OTHER; note = Nucleotide with phosphorothioate linkage
  modified_base 8: mod_base = OTHER; note = Thymine with phosphorothioate linkage
  modified_base 9: mod_base = OTHER; note = Nucleotide with phosphorothioate linkage
  modified_base 10: mod_base = OTHER; note = Nucleotide with phosphorothioate linkage
  modified_base 11: mod_base = OTHER; note = Abasic nucleotide with a phosphorothioate linkage
  modified_base 12: mod_base = OTHER; note = Nucleotide with phosphorothioate linkage
  modified_base 13: mod_base = OTHER; note = 5-methylcytosine with phosphorothioate linkage
  modified_base 14: mod_base = OTHER; note = Nucleotide with phosphorothioate linkage
  modified_base 15: mod_base = OTHER; note = Nucleotide with phosphorothioate linkage
  modified_base 16: mod_base = OTHER; note = 2'-O-methoxyethyl modified nucleotide with phosphorothioate linkage
  modified_base 17: mod_base = OTHER; note = 2'-O-methoxyethyl modified nucleotide with phosphorothioate linkage
  modified_base 18: mod_base = OTHER; note = 2'-O-methoxyethyl modified thymine with phosphorothioate linkage
  modified_base 19: mod_base = OTHER; note = 2'-O-methoxyethyl modified nucleotide with phosphorothioate linkage
  modified_base 20: mod_base = OTHER; note = 2'-O-methoxyethyl 5-methylcytosine
  misc_feature 1..5: note = RNA
  misc_feature 6..15: note = DNA
  misc_feature 16..20: note = RNA
gcagaggtgangcgaagtgc

SEQ ID NO: 1232 - DNA, 20 bp, synthetic construct
  source 1..20: mol_type = other DNA
  modified_base 1: mod_base = OTHER; note = Locked nucleic acid with phosphorothioate linkage
  modified_base 2: mod_base = OTHER; note = 2'-O-methoxyethyl 5-methylcytosine with phosphorothioate linkage
  modified_base 3: mod_base = OTHER; note = Locked nucleic acid with phosphorothioate linkage
  modified_base 4: mod_base = OTHER; note = 2'-O-methoxyethyl modified nucleotide with phosphorothioate linkage
  modified_base 5: mod_base = OTHER; note = 2'-O-methoxyethyl modified nucleotide with phosphorothioate linkage
  modified_base 6: mod_base = OTHER; note = Nucleotide with phosphorothioate linkage
  modified_base 7: mod_base = OTHER; note = Nucleotide with phosphorothioate linkage
  modified_base 8: mod_base = OTHER; note = Thymine with phosphorothioate linkage
  modified_base 9: mod_base = OTHER; note = Nucleotide with phosphorothioate linkage
  modified_base 10: mod_base = OTHER; note = Nucleotide with phosphorothioate linkage
  modified_base 11: mod_base = OTHER; note = Abasic nucleotide with a phosphorothioate linkage
  modified_base 12: mod_base = OTHER; note = Nucleotide with phosphorothioate linkage
  modified_base 13: mod_base = OTHER; note = 5-methylcytosine with phosphorothioate linkage
  modified_base 14: mod_base = OTHER; note = Nucleotide with phosphorothioate linkage
  modified_base 15: mod_base = OTHER; note = Nucleotide with phosphorothioate linkage
  modified_base 16: mod_base = OTHER; note = 2'-O-methoxyethyl modified nucleotide with phosphorothioate linkage
  modified_base 17: mod_base = OTHER; note = 2'-O-methoxyethyl modified nucleotide with phosphorothioate linkage
  modified_base 18: mod_base = OTHER; note = 2'-O-methoxyethyl modified thymine with phosphorothioate linkage
  modified_base 19: mod_base = OTHER; note = 2'-O-methoxyethyl modified nucleotide with phosphorothioate linkage
  modified_base 20: mod_base = OTHER; note = 2'-O-methoxyethyl 5-methylcytosine
  misc_feature 1..5: note = RNA
  misc_feature 6..15: note = DNA
  misc_feature 16..20: note = RNA
gcagaggtgangcgaagtgc

SEQ ID NO: 1233 - DNA, 20 bp, synthetic construct
  source 1..20: mol_type = other DNA
  modified_base 1: mod_base = OTHER; note = Locked nucleic acid with phosphorothioate linkage
  modified_base 2: mod_base = OTHER; note = 2'-O-methoxyethyl 5-methylcytosine with phosphorothioate linkage
  modified_base 3: mod_base = OTHER; note = 2'-O-methoxyethyl modified nucleotide with phosphorothioate linkage
  modified_base 4: mod_base = OTHER; note = Locked nucleic acid with phosphorothioate linkage
  modified_base 5: mod_base = OTHER; note = 2'-O-methoxyethyl modified nucleotide with phosphorothioate linkage
  modified_base 6: mod_base = OTHER; note = Nucleotide with phosphorothioate linkage
  modified_base 7: mod_base = OTHER; note = Nucleotide with phosphorothioate linkage
  modified_base 8: mod_base = OTHER; note = Thymine with phosphorothioate linkage
  modified_base 9: mod_base = OTHER; note = Nucleotide with phosphorothioate linkage
  modified_base 10: mod_base = OTHER; note = Nucleotide with phosphorothioate linkage
  modified_base 11: mod_base = OTHER; note = Abasic nucleotide with a phosphorothioate linkage
  modified_base 12: mod_base = OTHER; note = Nucleotide with phosphorothioate linkage
  modified_base 13: mod_base = OTHER; note = 5-methylcytosine with phosphorothioate linkage
  modified_base 14: mod_base = OTHER; note = Nucleotide with phosphorothioate linkage
  modified_base 15: mod_base = OTHER; note = Nucleotide with phosphorothioate linkage
  modified_base 16: mod_base = OTHER; note = 2'-O-methoxyethyl modified nucleotide with phosphorothioate linkage
  modified_base 17: mod_base = OTHER; note = 2'-O-methoxyethyl modified nucleotide with phosphorothioate linkage
  modified_base 18: mod_base = OTHER; note = 2'-O-methoxyethyl modified thymine with phosphorothioate linkage
  modified_base 19: mod_base = OTHER; note = 2'-O-methoxyethyl modified nucleotide with phosphorothioate linkage
  modified_base 20: mod_base = OTHER; note = 2'-O-methoxyethyl 5-methylcytosine
  misc_feature 1..5: note = RNA
  misc_feature 6..15: note = DNA
  misc_feature 16..20: note = RNA
gcagaggtgangcgaagtgc

SEQ ID NO: 1234 - DNA, 20 bp, synthetic construct
  source 1..20: mol_type = other DNA
  modified_base 1: mod_base = OTHER; note = Locked nucleic acid with phosphorothioate linkage
  modified_base 2: mod_base = OTHER; note = 2'-O-methoxyethyl 5-methylcytosine with phosphorothioate linkage
  modified_base 3: mod_base = OTHER; note = 2'-O-methoxyethyl modified nucleotide with phosphorothioate linkage
  modified_base 4: mod_base = OTHER; note = 2'-O-methoxyethyl modified nucleotide with phosphorothioate linkage
  modified_base 5: mod_base = OTHER; note = Locked nucleic acid with phosphorothioate linkage
  modified_base 6: mod_base = OTHER; note = Nucleotide with phosphorothioate linkage
  modified_base 7: mod_base = OTHER; note = Nucleotide with phosphorothioate linkage
  modified_base 8: mod_base = OTHER; note = Thymine with phosphorothioate linkage
  modified_base 9: mod_base = OTHER; note = Nucleotide with phosphorothioate linkage
  modified_base 10: mod_base = OTHER; note = Nucleotide with phosphorothioate linkage
  modified_base 11: mod_base = OTHER; note = Abasic nucleotide with a phosphorothioate linkage
  modified_base 12: mod_base = OTHER; note = Nucleotide with phosphorothioate linkage
  modified_base 13: mod_base = OTHER; note = 5-methylcytosine with phosphorothioate linkage
  modified_base 14: mod_base = OTHER; note = Nucleotide with phosphorothioate linkage
  modified_base 15: mod_base = OTHER; note = Nucleotide with phosphorothioate linkage
  modified_base 16: mod_base = OTHER; note = 2'-O-methoxyethyl modified nucleotide with phosphorothioate linkage
  modified_base 17: mod_base = OTHER; note = 2'-O-methoxyethyl modified nucleotide with phosphorothioate linkage
  modified_base 18: mod_base = OTHER; note = 2'-O-methoxyethyl modified thymine with phosphorothioate linkage
  modified_base 19: mod_base = OTHER; note = 2'-O-methoxyethyl modified nucleotide with phosphorothioate linkage
  modified_base 20: mod_base = OTHER; note = 2'-O-methoxyethyl 5-methylcytosine
  misc_feature 1..5: note = RNA
  misc_feature 6..15: note = DNA
  misc_feature 16..20: note = RNA
gcagaggtgangcgaagtgc

SEQ ID NO: 1235 - DNA, 20 bp, synthetic construct
  source 1..20: mol_type = other DNA
  modified_base 1: mod_base = OTHER; note = Locked nucleic acid with phosphorothioate linkage
  modified_base 2: mod_base = OTHER; note = 2'-O-methoxyethyl 5-methylcytosine with phosphorothioate linkage
  modified_base 3: mod_base = OTHER; note = 2'-O-methoxyethyl modified nucleotide with phosphorothioate linkage
  modified_base 4: mod_base = OTHER; note = 2'-O-methoxyethyl modified nucleotide with phosphorothioate linkage
  modified_base 5: mod_base = OTHER; note = 2'-O-methoxyethyl modified nucleotide with phosphorothioate linkage
  modified_base 6: mod_base = OTHER; note = Nucleotide with phosphorothioate linkage
  modified_base 7: mod_base = OTHER; note = Nucleotide with phosphorothioate linkage
  modified_base 8: mod_base = OTHER; note = Thymine with phosphorothioate linkage
  modified_base 9: mod_base = OTHER; note = Nucleotide with phosphorothioate linkage
  modified_base 10: mod_base = OTHER; note = Nucleotide with phosphorothioate linkage
  modified_base 11: mod_base = OTHER; note = Abasic nucleotide with a phosphorothioate linkage
  modified_base 12: mod_base = OTHER; note = Nucleotide with phosphorothioate linkage
  modified_base 13: mod_base = OTHER; note = 5-methylcytosine with phosphorothioate linkage
  modified_base 14: mod_base = OTHER; note = Nucleotide with phosphorothioate linkage
  modified_base 15: mod_base = OTHER; note = Nucleotide with phosphorothioate linkage
  modified_base 16: mod_base = OTHER; note = Locked nucleic acid with phosphorothioate linkage
  modified_base 17: mod_base = OTHER; note = 2'-O-methoxyethyl modified nucleotide with phosphorothioate linkage
  modified_base 18: mod_base = OTHER; note = 2'-O-methoxyethyl modified thymine with phosphorothioate linkage
  modified_base 19: mod_base = OTHER; note = 2'-O-methoxyethyl modified nucleotide with phosphorothioate linkage
  modified_base 20: mod_base = OTHER; note = 2'-O-methoxyethyl 5-methylcytosine
  misc_feature 1..5: note = RNA
  misc_feature 6..15: note = DNA
  misc_feature 16..20: note = RNA
gcagaggtgangcgaagtgc

SEQ ID NO: 1236 - DNA, 20 bp, synthetic construct
  source 1..20: mol_type = other DNA
  modified_base 1: mod_base = OTHER; note = Locked nucleic acid with phosphorothioate linkage
  modified_base 2: mod_base = OTHER; note = 2'-O-methoxyethyl 5-methylcytosine with phosphorothioate linkage
  modified_base 3: mod_base = OTHER; note = 2'-O-methoxyethyl modified nucleotide with phosphorothioate linkage
  modified_base 4: mod_base = OTHER; note = 2'-O-methoxyethyl modified nucleotide with phosphorothioate linkage
  modified_base 5: mod_base = OTHER; note = 2'-O-methoxyethyl modified nucleotide with phosphorothioate linkage
  modified_base 6: mod_base = OTHER; note = Nucleotide with phosphorothioate linkage
  modified_base 7: mod_base = OTHER; note = Nucleotide with phosphorothioate linkage
  modified_base 8: mod_base = OTHER; note = Thymine with phosphorothioate linkage
  modified_base 9: mod_base = OTHER; note = Nucleotide with phosphorothioate linkage
  modified_base 10: mod_base = OTHER; note = Nucleotide with phosphorothioate linkage
  modified_base 11: mod_base = OTHER; note = Abasic nucleotide with a phosphorothioate linkage
  modified_base 12: mod_base = OTHER; note = Nucleotide with phosphorothioate linkage
  modified_base 13: mod_base = OTHER; note = 5-methylcytosine with phosphorothioate linkage
  modified_base 14: mod_base = OTHER; note = Nucleotide with phosphorothioate linkage
  modified_base 15: mod_base = OTHER; note = Nucleotide with phosphorothioate linkage
  modified_base 16: mod_base = OTHER; note = 2'-O-methoxyethyl modified nucleotide with phosphorothioate linkage
  modified_base 17: mod_base = OTHER; note = Locked nucleic acid with phosphorothioate linkage
  modified_base 18: mod_base = OTHER; note = 2'-O-methoxyethyl modified thymine with phosphorothioate linkage
  modified_base 19: mod_base = OTHER; note = 2'-O-methoxyethyl modified nucleotide with phosphorothioate linkage
  modified_base 20: mod_base = OTHER; note = 2'-O-methoxyethyl 5-methylcytosine
  misc_feature 1..5: note = RNA
  misc_feature 6..15: note = DNA
  misc_feature 16..20: note = RNA
gcagaggtgangcgaagtgc

SEQ ID NO: 1237 - DNA, 20 bp, synthetic construct
  source 1..20: mol_type = other DNA
  modified_base 1: mod_base = OTHER; note = Locked nucleic acid with phosphorothioate linkage
  modified_base 2: mod_base = OTHER; note = 2'-O-methoxyethyl 5-methylcytosine with phosphorothioate linkage
  modified_base 3: mod_base = OTHER; note = 2'-O-methoxyethyl modified nucleotide with phosphorothioate linkage
  modified_base 4: mod_base = OTHER; note = 2'-O-methoxyethyl modified nucleotide with phosphorothioate linkage
  modified_base 5: mod_base = OTHER; note = 2'-O-methoxyethyl modified nucleotide with phosphorothioate linkage
  modified_base 6: mod_base = OTHER; note = Nucleotide with phosphorothioate linkage
  modified_base 7: mod_base = OTHER; note = Nucleotide with phosphorothioate linkage
  modified_base 8: mod_base = OTHER; note = Thymine with phosphorothioate linkage
  modified_base 9: mod_base = OTHER; note = Nucleotide with phosphorothioate linkage
  modified_base 10: mod_base = OTHER; note = Nucleotide with phosphorothioate linkage
  modified_base 11: mod_base = OTHER; note = Abasic nucleotide with a phosphorothioate linkage
  modified_base 12: mod_base = OTHER; note = Nucleotide with phosphorothioate linkage
  modified_base 13: mod_base = OTHER; note = 5-methylcytosine with phosphorothioate linkage
  modified_base 14: mod_base = OTHER; note = Nucleotide with phosphorothioate linkage
  modified_base 15: mod_base = OTHER; note = Nucleotide with phosphorothioate linkage
  modified_base 16: mod_base = OTHER; note = 2'-O-methoxyethyl modified nucleotide with phosphorothioate linkage
  modified_base 17: mod_base = OTHER; note = 2'-O-methoxyethyl modified nucleotide with phosphorothioate linkage
  modified_base 18: mod_base = OTHER; note = Locked thymine with phosphorothioate linkage
  modified_base 19: mod_base = OTHER; note = 2'-O-methoxyethyl modified nucleotide with phosphorothioate linkage
  modified_base 20: mod_base = OTHER; note = 2'-O-methoxyethyl 5-methylcytosine
  misc_feature 1..5: note = RNA
  misc_feature 6..15: note = DNA
  misc_feature 16..20: note = RNA
gcagaggtgangcgaagtgc

SEQ ID NO: 1238 - DNA, 20 bp, synthetic construct
  source 1..20: mol_type = other DNA
  modified_base 1: mod_base = OTHER; note = Locked nucleic acid with phosphorothioate linkage
  modified_base 2: mod_base = OTHER; note = 2'-O-methoxyethyl 5-methylcytosine with phosphorothioate linkage
  modified_base 3: mod_base = OTHER; note = 2'-O-methoxyethyl modified nucleotide with phosphorothioate linkage
  modified_base 4: mod_base = OTHER; note = 2'-O-methoxyethyl modified nucleotide with phosphorothioate linkage
  modified_base 5: mod_base = OTHER; note = 2'-O-methoxyethyl modified nucleotide with phosphorothioate linkage
  modified_base 6: mod_base = OTHER; note = Nucleotide with phosphorothioate linkage
  modified_base 7: mod_base = OTHER; note = Nucleotide with phosphorothioate linkage
  modified_base 8: mod_base = OTHER; note = Thymine with phosphorothioate linkage
  modified_base 9: mod_base = OTHER; note = Nucleotide with phosphorothioate linkage
  modified_base 10: mod_base = OTHER; note = Nucleotide with phosphorothioate linkage
  modified_base 11: mod_base = OTHER; note = Abasic nucleotide with a phosphorothioate linkage
  modified_base 12: mod_base = OTHER; note = Nucleotide with phosphorothioate linkage
  modified_base 13: mod_base = OTHER; note = 5-methylcytosine with phosphorothioate linkage
  modified_base 14: mod_base = OTHER; note = Nucleotide with phosphorothioate linkage
  modified_base 15: mod_base = OTHER; note = Nucleotide with phosphorothioate linkage
  modified_base 16: mod_base = OTHER; note = 2'-O-methoxyethyl modified nucleotide with phosphorothioate linkage
  modified_base 17: mod_base = OTHER; note = 2'-O-methoxyethyl modified nucleotide with phosphorothioate linkage
  modified_base 18: mod_base = OTHER; note = 2'-O-methoxyethyl modified thymine with phosphorothioate linkage
  modified_base 19: mod_base = OTHER; note = Locked nucleic acid with phosphorothioate linkage
  modified_base 20: mod_base = OTHER; note = 2'-O-methoxyethyl 5-methylcytosine
  misc_feature 1..5: note = RNA
  misc_feature 6..15: note = DNA
  misc_feature 16..20: note = RNA
gcagaggtgangcgaagtgc

SEQ ID NO: 1239 - DNA, 20 bp, synthetic construct
  source 1..20: mol_type = other DNA
  modified_base 1: mod_base = OTHER; note = Locked nucleic acid with phosphorothioate linkage
  modified_base 2: mod_base = OTHER; note = 2'-O-methoxyethyl 5-methylcytosine with phosphorothioate linkage
  modified_base 3: mod_base = OTHER; note = 2'-O-methoxyethyl modified nucleotide with phosphorothioate linkage
  modified_base 4: mod_base = OTHER; note = 2'-O-methoxyethyl modified nucleotide with phosphorothioate linkage
  modified_base 5: mod_base = OTHER; note = 2'-O-methoxyethyl modified nucleotide with phosphorothioate linkage
  modified_base 6: mod_base = OTHER; note = Nucleotide with phosphorothioate linkage
  modified_base 7: mod_base = OTHER; note = Nucleotide with phosphorothioate linkage
  modified_base 8: mod_base = OTHER; note = Thymine with phosphorothioate linkage
  modified_base 9: mod_base = OTHER; note = Nucleotide with phosphorothioate linkage
  modified_base 10: mod_base = OTHER; note = Nucleotide with phosphorothioate linkage
  modified_base 11: mod_base = OTHER; note = Abasic nucleotide with a phosphorothioate linkage
  modified_base 12: mod_base = OTHER; note = Nucleotide with phosphorothioate linkage
  modified_base 13: mod_base = OTHER; note = 5-methylcytosine with phosphorothioate linkage
  modified_base 14: mod_base = OTHER; note = Nucleotide with phosphorothioate linkage
  modified_base 15: mod_base = OTHER; note = Nucleotide with phosphorothioate linkage
  modified_base 16: mod_base = OTHER; note = 2'-O-methoxyethyl modified nucleotide with phosphorothioate linkage
  modified_base 17: mod_base = OTHER; note = 2'-O-methoxyethyl modified nucleotide with phosphorothioate linkage
  modified_base 18: mod_base = OTHER; note = 2'-O-methoxyethyl modified thymine with phosphorothioate linkage
  modified_base 19: mod_base = OTHER; note = 2'-O-methoxyethyl modified nucleotide with phosphorothioate linkage
  modified_base 20: mod_base = OTHER; note = Locked 5-methylcytosine
  misc_feature 1..5: note = RNA
  misc_feature 6..15: note = DNA
  misc_feature 16..20: note = RNA
gcagaggtgangcgaagtgc

SEQ ID NO: 1240 - DNA, 20 bp, synthetic construct
  source 1..20: mol_type = other DNA
  modified_base 1: mod_base = OTHER; note = 2'-O-methoxyethyl modified nucleotide with phosphorothioate linkage
  modified_base 2: mod_base = OTHER; note = Locked 5-methylcytosine with phosphorothioate linkage
  modified_base 3: mod_base = OTHER; note = Locked nucleic acid with phosphorothioate linkage
  modified_base 4: mod_base = OTHER; note = 2'-O-methoxyethyl modified nucleotide with phosphorothioate linkage
  modified_base 5: mod_base = OTHER; note = 2'-O-methoxyethyl modified nucleotide with phosphorothioate linkage
  modified_base 6: mod_base = OTHER; note = Nucleotide with phosphorothioate linkage
  modified_base 7: mod_base = OTHER; note = Nucleotide with phosphorothioate linkage
  modified_base 8: mod_base = OTHER; note = Thymine with phosphorothioate linkage
  modified_base 9: mod_base = OTHER; note = Nucleotide with phosphorothioate linkage
  modified_base 10: mod_base = OTHER; note = Nucleotide with phosphorothioate linkage
  modified_base 11: mod_base = OTHER; note = Abasic nucleotide with a phosphorothioate linkage
  modified_base 12: mod_base = OTHER; note = Nucleotide with phosphorothioate linkage
  modified_base 13: mod_base = OTHER; note = 5-methylcytosine with phosphorothioate linkage
  modified_base 14: mod_base = OTHER; note = Nucleotide with phosphorothioate linkage
  modified_base 15: mod_base = OTHER; note = Nucleotide with phosphorothioate linkage
  modified_base 16: mod_base = OTHER; note = 2'-O-methoxyethyl modified nucleotide with phosphorothioate linkage
  modified_base 17: mod_base = OTHER; note = 2'-O-methoxyethyl modified nucleotide with phosphorothioate linkage
  modified_base 18: mod_base = OTHER; note = 2'-O-methoxyethyl modified thymine with phosphorothioate linkage
  modified_base 19: mod_base = OTHER; note = 2'-O-methoxyethyl modified nucleotide with phosphorothioate linkage
  modified_base 20: mod_base = OTHER; note = 2'-O-methoxyethyl 5-methylcytosine
  misc_feature 1..5: note = RNA
  misc_feature 6..15: note = DNA
  misc_feature 16..20: note = RNA
gcagaggtgangcgaagtgc

SEQ ID NO: 1241 - DNA, 20 bp, synthetic construct
  source 1..20: mol_type = other DNA
  modified_base 1: mod_base = OTHER; note = 2'-O-methoxyethyl modified nucleotide with phosphorothioate linkage
  modified_base 2: mod_base = OTHER; note = Locked 5-methylcytosine with phosphorothioate linkage
  modified_base 3: mod_base = OTHER; note = 2'-O-methoxyethyl modified nucleotide with phosphorothioate linkage
  modified_base 4: mod_base = OTHER; note = Locked nucleic acid with phosphorothioate linkage
  modified_base 5: mod_base = OTHER; note = 2'-O-methoxyethyl modified nucleotide with phosphorothioate linkage
  modified_base 6: mod_base = OTHER; note = Nucleotide with phosphorothioate linkage
  modified_base 7: mod_base = OTHER; note = Nucleotide with phosphorothioate linkage
  modified_base 8: mod_base = OTHER; note = Thymine with phosphorothioate linkage
  modified_base 9: mod_base = OTHER; note = Nucleotide with phosphorothioate linkage
  modified_base 10: mod_base = OTHER; note = Nucleotide with phosphorothioate linkage
  modified_base 11: mod_base = OTHER; note = Abasic nucleotide with a phosphorothioate linkage
  modified_base 12: mod_base = OTHER; note = Nucleotide with phosphorothioate linkage
  modified_base 13: mod_base = OTHER; note = 5-methylcytosine with phosphorothioate linkage
  modified_base 14: mod_base = OTHER; note = Nucleotide with phosphorothioate linkage
  modified_base 15: mod_base = OTHER; note = Nucleotide with phosphorothioate linkage
  modified_base 16: mod_base = OTHER; note = 2'-O-methoxyethyl modified nucleotide with phosphorothioate linkage
  modified_base 17: mod_base = OTHER; note = 2'-O-methoxyethyl modified nucleotide with phosphorothioate linkage
  modified_base 18: mod_base = OTHER; note = 2'-O-methoxyethyl modified thymine with phosphorothioate linkage
  modified_base 19: mod_base = OTHER; note = 2'-O-methoxyethyl modified nucleotide with phosphorothioate linkage
  modified_base 20: mod_base = OTHER; note = 2'-O-methoxyethyl 5-methylcytosine
  misc_feature 1..5: note = RNA
  misc_feature 6..15: note = DNA
  misc_feature 16..20: note = RNA
gcagaggtgangcgaagtgc

SEQ ID NO: 1242 - DNA, 20 bp, synthetic construct
  source 1..20: mol_type = other DNA
  modified_base 1: mod_base = OTHER; note = 2'-O-methoxyethyl modified nucleotide with phosphorothioate linkage
  modified_base 2: mod_base = OTHER; note = Locked 5-methylcytosine with phosphorothioate linkage
  modified_base 3: mod_base = OTHER; note = 2'-O-methoxyethyl modified nucleotide with phosphorothioate linkage
  modified_base 4: mod_base = OTHER; note = 2'-O-methoxyethyl modified nucleotide with phosphorothioate linkage
  modified_base 5: mod_base = OTHER; note = Locked nucleic acid with phosphorothioate linkage
  modified_base 6: mod_base = OTHER; note = Nucleotide with phosphorothioate linkage
  modified_base 7: mod_base = OTHER; note = Nucleotide with phosphorothioate linkage
  modified_base 8: mod_base = OTHER; note = Thymine with phosphorothioate linkage
  modified_base 9: mod_base = OTHER; note = Nucleotide with phosphorothioate linkage
  modified_base 10: mod_base = OTHER; note = Nucleotide with phosphorothioate linkage
  modified_base 11: mod_base = OTHER; note = Abasic nucleotide with a phosphorothioate linkage
  modified_base 12: mod_base = OTHER; note = Nucleotide with phosphorothioate linkage
  modified_base 13: mod_base = OTHER; note = 5-methylcytosine with phosphorothioate linkage
  modified_base 14: mod_base = OTHER; note = Nucleotide with phosphorothioate linkage
  modified_base 15: mod_base = OTHER; note = Nucleotide with phosphorothioate linkage
  modified_base 16: mod_base = OTHER; note = 2'-O-methoxyethyl modified nucleotide with phosphorothioate linkage
  modified_base 17: mod_base = OTHER; note = 2'-O-methoxyethyl modified nucleotide with phosphorothioate linkage
  modified_base 18: mod_base = OTHER; note = 2'-O-methoxyethyl modified thymine with phosphorothioate linkage
  modified_base 19: mod_base = OTHER; note = 2'-O-methoxyethyl modified nucleotide with phosphorothioate linkage
  modified_base 20: mod_base = OTHER; note = 2'-O-methoxyethyl 5-methylcytosine
  misc_feature 1..5: note = RNA
  misc_feature 6..15: note = DNA
  misc_feature 16..20: note = RNA
gcagaggtgangcgaagtgc

SEQ ID NO: 1243 - DNA, 20 bp, synthetic construct
  source 1..20: mol_type = other DNA
  modified_base 1: mod_base = OTHER; note = 2'-O-methoxyethyl modified nucleotide with phosphorothioate linkage
  modified_base 2: mod_base = OTHER; note = Locked 5-methylcytosine with phosphorothioate linkage
  modified_base 3: mod_base = OTHER; note = 2'-O-methoxyethyl modified nucleotide with phosphorothioate linkage
  modified_base 4: mod_base = OTHER; note = 2'-O-methoxyethyl modified nucleotide with phosphorothioate linkage
  modified_base 5: mod_base = OTHER; note = 2'-O-methoxyethyl modified nucleotide with phosphorothioate linkage
  modified_base 6: mod_base = OTHER; note = Nucleotide with phosphorothioate linkage
  modified_base 7: mod_base = OTHER; note = Nucleotide with phosphorothioate linkage
  modified_base 8: mod_base = OTHER; note = Thymine with phosphorothioate linkage
  modified_base 9: mod_base = OTHER; note = Nucleotide with phosphorothioate linkage
  modified_base 10: mod_base = OTHER; note = Nucleotide with phosphorothioate linkage
  modified_base 11: mod_base = OTHER; note = Abasic nucleotide with a phosphorothioate linkage
  modified_base 12: mod_base = OTHER; note = Nucleotide with phosphorothioate linkage
  modified_base 13: mod_base = OTHER; note = 5-methylcytosine with phosphorothioate linkage
  modified_base 14: mod_base = OTHER; note = Nucleotide with phosphorothioate linkage
  modified_base 15: mod_base = OTHER; note = Nucleotide with phosphorothioate linkage
  modified_base 16: mod_base = OTHER; note = 2'-O-methoxyethyl modified nucleotide with phosphorothioate linkage
  modified_base 17: mod_base = OTHER; note = Locked nucleic acid with phosphorothioate linkage
  modified_base 18: mod_base = OTHER; note = 2'-O-methoxyethyl modified thymine with phosphorothioate linkage
  modified_base 19: mod_base = OTHER; note = 2'-O-methoxyethyl modified nucleotide with phosphorothioate linkage
  modified_base 20: mod_base = OTHER; note = 2'-O-methoxyethyl 5-methylcytosine
  misc_feature 1..5: note = RNA
  misc_feature 6..15: note = DNA
  misc_feature 16..20: note = RNA
gcagaggtgangcgaagtgc

SEQ ID NO: 1244 - DNA, 20 bp, synthetic construct
  source 1..20: mol_type = other DNA
  modified_base 1: mod_base = OTHER; note = 2'-O-methoxyethyl modified nucleotide with phosphorothioate linkage
  modified_base 2: mod_base = OTHER; note = Locked 5-methylcytosine with phosphorothioate linkage
  modified_base 3: mod_base = OTHER; note = 2'-O-methoxyethyl modified nucleotide with phosphorothioate linkage
  modified_base 4: mod_base = OTHER; note = 2'-O-methoxyethyl modified nucleotide with phosphorothioate linkage
  modified_base 5: mod_base = OTHER; note = 2'-O-methoxyethyl modified nucleotide with phosphorothioate linkage
  modified_base 6: mod_base = OTHER; note = Nucleotide with phosphorothioate linkage
  modified_base 7: mod_base = OTHER; note = Nucleotide with phosphorothioate linkage
  modified_base 8: mod_base = OTHER; note = Thymine with phosphorothioate linkage
  modified_base 9: mod_base = OTHER; note = Nucleotide with phosphorothioate linkage
  modified_base 10: mod_base = OTHER; note = Nucleotide with phosphorothioate linkage
  modified_base 11: mod_base = OTHER; note = Abasic nucleotide with a phosphorothioate linkage
  modified_base 12: mod_base = OTHER; note = Nucleotide with phosphorothioate linkage
  modified_base 13: mod_base = OTHER; note = 5-methylcytosine with phosphorothioate linkage
  modified_base 14: mod_base = OTHER; note = Nucleotide with phosphorothioate linkage
  modified_base 15: mod_base = OTHER; note = Nucleotide with phosphorothioate linkage
  modified_base 16: mod_base = OTHER; note = 2'-O-methoxyethyl modified nucleotide with phosphorothioate linkage
  modified_base 17: mod_base = OTHER; note = 2'-O-methoxyethyl modified nucleotide with phosphorothioate linkage
  modified_base 18: mod_base = OTHER; note = Locked thymine with phosphorothioate linkage
  modified_base 19: mod_base = OTHER; note = 2'-O-methoxyethyl modified nucleotide with phosphorothioate linkage
  modified_base 20: mod_base = OTHER; note = 2'-O-methoxyethyl 5-methylcytosine
  misc_feature 1..5: note = RNA
  misc_feature 6..15: note = DNA
  misc_feature 16..20: note = RNA
gcagaggtgangcgaagtgc

SEQ ID NO: 1245 - DNA, 20 bp, synthetic construct
  source 1..20: mol_type = other DNA
  modified_base 1: mod_base = OTHER; note = 2'-O-methoxyethyl modified nucleotide with phosphorothioate linkage
  modified_base 2: mod_base = OTHER; note = Locked 5-methylcytosine with phosphorothioate linkage
  modified_base 3: mod_base = OTHER; note = 2'-O-methoxyethyl modified nucleotide with phosphorothioate linkage
  modified_base 4: mod_base = OTHER; note = 2'-O-methoxyethyl modified nucleotide with phosphorothioate linkage
  modified_base 5: mod_base = OTHER; note = 2'-O-methoxyethyl modified nucleotide with phosphorothioate linkage
  modified_base 6: mod_base = OTHER; note = Nucleotide with phosphorothioate linkage
  modified_base 7: mod_base = OTHER; note = Nucleotide with phosphorothioate linkage
  modified_base 8: mod_base = OTHER; note = Thymine with phosphorothioate linkage
  modified_base 9: mod_base = OTHER; note = Nucleotide with phosphorothioate linkage
  modified_base 10: mod_base = OTHER; note = Nucleotide with phosphorothioate linkage
  modified_base 11: mod_base = OTHER; note = Abasic nucleotide with a phosphorothioate linkage
  modified_base 12: mod_base = OTHER; note = Nucleotide with phosphorothioate linkage
  modified_base 13: mod_base = OTHER; note = 5-methylcytosine with phosphorothioate linkage
  modified_base 14: mod_base = OTHER; note = Nucleotide with phosphorothioate linkage
  modified_base 15: mod_base = OTHER; note = Nucleotide with phosphorothioate linkage
  modified_base 16: mod_base = OTHER; note = 2'-O-methoxyethyl modified nucleotide with phosphorothioate linkage
  modified_base 17: mod_base = OTHER; note = 2'-O-methoxyethyl modified nucleotide with phosphorothioate linkage
  modified_base 18: mod_base = OTHER; note = 2'-O-methoxyethyl modified thymine with phosphorothioate linkage
  modified_base 19: mod_base = OTHER; note = Locked nucleic acid with phosphorothioate linkage
  modified_base 20: mod_base = OTHER; note = 2'-O-methoxyethyl 5-methylcytosine
  misc_feature 1..5: note = RNA
  misc_feature 6..15: note = DNA
  misc_feature 16..20: note = RNA
gcagaggtgangcgaagtgc

SEQ ID NO: 1246 - DNA, 20 bp, synthetic construct
  source 1..20: mol_type = other DNA
  modified_base 1: mod_base = OTHER; note = 2'-O-methoxyethyl modified nucleotide with phosphorothioate linkage
  modified_base 2: mod_base = OTHER; note = Locked 5-methylcytosine with phosphorothioate linkage
  modified_base 3: mod_base = OTHER; note = 2'-O-methoxyethyl modified nucleotide with phosphorothioate linkage
  modified_base 4: mod_base = OTHER; note = 2'-O-methoxyethyl modified nucleotide with phosphorothioate linkage
  modified_base 5: mod_base = OTHER; note = 2'-O-methoxyethyl modified nucleotide with phosphorothioate linkage
  modified_base 6: mod_base = OTHER; note = Nucleotide with phosphorothioate linkage
  modified_base 7: mod_base = OTHER; note = Nucleotide with phosphorothioate linkage
  modified_base 8: mod_base = OTHER; note = Thymine with phosphorothioate linkage
  modified_base 9: mod_base = OTHER; note = Nucleotide with phosphorothioate linkage
  modified_base 10: mod_base = OTHER; note = Nucleotide with phosphorothioate linkage
  modified_base 11: mod_base = OTHER; note = Abasic nucleotide with a phosphorothioate linkage
  modified_base 12: mod_base = OTHER; note = Nucleotide with phosphorothioate linkage
  modified_base 13: mod_base = OTHER; note = 5-methylcytosine with phosphorothioate linkage
  modified_base 14: mod_base = OTHER; note = Nucleotide with phosphorothioate linkage
  modified_base 15: mod_base = OTHER; note = Nucleotide with phosphorothioate linkage
  modified_base 16: mod_base = OTHER; note = 2'-O-methoxyethyl modified nucleotide with phosphorothioate linkage
  modified_base 17: mod_base = OTHER; note = 2'-O-methoxyethyl modified nucleotide with phosphorothioate linkage
  modified_base 18: mod_base = OTHER; note = 2'-O-methoxyethyl modified thymine with phosphorothioate linkage
  modified_base 19: mod_base = OTHER; note = 2'-O-methoxyethyl modified nucleotide with phosphorothioate linkage
  modified_base 20: mod_base = OTHER; note = Locked 5-methylcytosine
  misc_feature 1..5: note = RNA
  misc_feature 6..15: note = DNA
  misc_feature 16..20: note = RNA
gcagaggtgangcgaagtgc

SEQ ID NO: 1247 - DNA, 20 bp, synthetic construct
  source 1..20: mol_type = other DNA
  modified_base 1: mod_base = OTHER; note = 2'-O-methoxyethyl modified nucleotide with phosphorothioate linkage
  modified_base 2: mod_base = OTHER; note = 2'-O-methoxyethyl 5-methylcytosine with phosphorothioate linkage
  modified_base 3: mod_base = OTHER; note = Locked nucleic acid with phosphorothioate linkage
  modified_base 4: mod_base = OTHER; note = Locked nucleic acid with phosphorothioate linkage
  modified_base 5: mod_base = OTHER; note = 2'-O-methoxyethyl modified nucleotide with phosphorothioate linkage
  modified_base 6: mod_base = OTHER; note = Nucleotide with phosphorothioate linkage
  modified_base 7: mod_base = OTHER; note = Nucleotide with phosphorothioate linkage
  modified_base 8: mod_base = OTHER; note = Thymine with phosphorothioate linkage
  modified_base 9: mod_base = OTHER; note = Nucleotide with phosphorothioate linkage
  modified_base 10: mod_base = OTHER; note = Nucleotide with phosphorothioate linkage
  modified_base 11: mod_base = OTHER; note = Abasic nucleotide with a phosphorothioate linkage
  modified_base 12: mod_base = OTHER; note = Nucleotide with phosphorothioate linkage
  modified_base 13: mod_base = OTHER; note = 5-methylcytosine with phosphorothioate linkage
  modified_base 14: mod_base = OTHER; note = Nucleotide with phosphorothioate linkage
  modified_base 15: mod_base = OTHER; note = Nucleotide with phosphorothioate linkage
  modified_base 16: mod_base = OTHER; note = 2'-O-methoxyethyl modified nucleotide with phosphorothioate linkage
  modified_base 17: mod_base = OTHER; note = 2'-O-methoxyethyl modified nucleotide with phosphorothioate linkage
  modified_base 18: mod_base = OTHER; note = 2'-O-methoxyethyl modified thymine with phosphorothioate linkage
  modified_base 19: mod_base = OTHER; note = 2'-O-methoxyethyl modified nucleotide with phosphorothioate linkage
  modified_base 20: mod_base = OTHER; note = 2'-O-methoxyethyl 5-methylcytosine
  misc_feature 1..5: note = RNA
  misc_feature 6..15: note = DNA
  misc_feature 16..20: note = RNA
gcagaggtgangcgaagtgc

SEQ ID NO: 1248 - DNA, 20 bp, synthetic construct
  source 1..20: mol_type = other DNA
  modified_base 1: mod_base = OTHER; note = 2'-O-methoxyethyl modified nucleotide with phosphorothioate linkage
  modified_base 2: mod_base = OTHER; note = 2'-O-methoxyethyl 5-methylcytosine with phosphorothioate linkage
  modified_base 3: mod_base = OTHER; note = Locked nucleic acid with phosphorothioate linkage
  modified_base 4: mod_base = OTHER; note = 2'-O-methoxyethyl modified nucleotide with phosphorothioate linkage
  modified_base 5: mod_base = OTHER; note = 2'-O-methoxyethyl modified nucleotide with phosphorothioate linkage
  modified_base 6: mod_base = OTHER; note = Nucleotide with phosphorothioate linkage
  modified_base 7: mod_base = OTHER; note = Nucleotide with phosphorothioate linkage
  modified_base 8: mod_base = OTHER; note = Thymine with phosphorothioate linkage
  modified_base 9: mod_base = OTHER; note = Nucleotide with phosphorothioate linkage
  modified_base 10: mod_base = OTHER; note = Nucleotide with phosphorothioate linkage
  modified_base 11: mod_base = OTHER; note = Abasic nucleotide with a phosphorothioate linkage
  modified_base 12: mod_base = OTHER; note = Nucleotide with phosphorothioate linkage
  modified_base 13: mod_base = OTHER; note = 5-methylcytosine with phosphorothioate linkage
  modified_base 14: mod_base = OTHER; note = Nucleotide with phosphorothioate linkage
  modified_base 15: mod_base = OTHER; note = Nucleotide with phosphorothioate linkage
  modified_base 16: mod_base = OTHER; note = Locked nucleic acid with phosphorothioate linkage
  modified_base 17: mod_base = OTHER; note = 2'-O-methoxyethyl modified nucleotide with phosphorothioate linkage
  modified_base 18: mod_base = OTHER; note = 2'-O-methoxyethyl modified thymine with phosphorothioate linkage
  modified_base 19: mod_base = OTHER; note = 2'-O-methoxyethyl modified nucleotide with phosphorothioate linkage
  modified_base 20: mod_base = OTHER; note = 2'-O-methoxyethyl 5-methylcytosine
  misc_feature 1..5: note = RNA
  misc_feature 6..15: note = DNA
  misc_feature 16..20: note = RNA
gcagaggtgangcgaagtgc

SEQ ID NO: 1249 - DNA, 20 bp, synthetic construct
  source 1..20: mol_type = other DNA
  modified_base 1: mod_base = OTHER; note = 2'-O-methoxyethyl modified nucleotide with phosphorothioate linkage
  modified_base 2: mod_base = OTHER; note = 2'-O-methoxyethyl 5-methylcytosine with phosphorothioate linkage
  modified_base 3: mod_base = OTHER; note = Locked nucleic acid with phosphorothioate linkage
  modified_base 4: mod_base = OTHER; note = 2'-O-methoxyethyl modified nucleotide with phosphorothioate linkage
  modified_base 5: mod_base = OTHER; note = 2'-O-methoxyethyl modified nucleotide with phosphorothioate linkage
  modified_base 6: mod_base = OTHER; note = Nucleotide with phosphorothioate linkage
  modified_base 7: mod_base = OTHER; note = Nucleotide with phosphorothioate linkage
  modified_base 8: mod_base = OTHER; note = Thymine with phosphorothioate linkage
  modified_base 9: mod_base = OTHER; note = Nucleotide with phosphorothioate linkage
  modified_base 10: mod_base = OTHER; note = Nucleotide with phosphorothioate linkage
  modified_base 11: mod_base = OTHER; note = Abasic nucleotide with a phosphorothioate linkage
  modified_base 12: mod_base = OTHER; note = Nucleotide with phosphorothioate linkage
  modified_base 13: mod_base = OTHER; note = 5-methylcytosine with phosphorothioate linkage
  modified_base 14: mod_base = OTHER; note = Nucleotide with phosphorothioate linkage
  modified_base 15: mod_base = OTHER; note = Nucleotide with phosphorothioate linkage
  modified_base 16: mod_base = OTHER; note = 2'-O-methoxyethyl modified nucleotide with phosphorothioate linkage
  modified_base 17: mod_base = OTHER; note = Locked nucleic acid with phosphorothioate linkage
  modified_base 18: mod_base = OTHER; note = 2'-O-methoxyethyl modified thymine with phosphorothioate linkage
  modified_base 19: mod_base = OTHER; note = 2'-O-methoxyethyl modified nucleotide with phosphorothioate linkage
  modified_base 20: mod_base = OTHER; note = 2'-O-methoxyethyl 5-methylcytosine
  misc_feature 1..5: note = RNA
  misc_feature 6..15: note = DNA
  misc_feature 16..20: note = RNA
gcagaggtgangcgaagtgc

SEQ ID NO: 1250 - DNA, 20 bp, synthetic construct
  source 1..20: mol_type = other DNA
  modified_base 1: mod_base = OTHER; note = 2'-O-methoxyethyl modified nucleotide with phosphorothioate linkage
  modified_base 2: mod_base = OTHER; note = 2'-O-methoxyethyl 5-methylcytosine with phosphorothioate linkage
  modified_base 3: mod_base = OTHER; note = Locked nucleic acid with phosphorothioate linkage
  modified_base 4: mod_base = OTHER; note = 2'-O-methoxyethyl modified nucleotide with phosphorothioate linkage
  modified_base 5: mod_base = OTHER; note = 2'-O-methoxyethyl modified nucleotide with phosphorothioate linkage
  modified_base 6: mod_base = OTHER; note = Nucleotide with phosphorothioate linkage
  modified_base 7: mod_base = OTHER; note = Nucleotide with phosphorothioate linkage
  modified_base 8: mod_base = OTHER; note = Thymine with phosphorothioate linkage
  modified_base 9: mod_base = OTHER; note = Nucleotide with phosphorothioate linkage
  modified_base 10: mod_base = OTHER; note = Nucleotide with phosphorothioate linkage
  modified_base 11: mod_base = OTHER; note = Abasic nucleotide with a phosphorothioate linkage
  modified_base 12: mod_base = OTHER; note = Nucleotide with phosphorothioate linkage
  modified_base 13: mod_base = OTHER; note = 5-methylcytosine with phosphorothioate linkage
  modified_base 14: mod_base = OTHER; note = Nucleotide with phosphorothioate linkage
  modified_base 15: mod_base = OTHER; note = Nucleotide with phosphorothioate linkage
  modified_base 16: mod_base = OTHER; note = 2'-O-methoxyethyl modified nucleotide with phosphorothioate linkage
  modified_base 17: mod_base = OTHER; note = 2'-O-methoxyethyl modified nucleotide with phosphorothioate linkage
  modified_base 18: mod_base = OTHER; note = 2'-O-methoxyethyl modified thymine with phosphorothioate linkage
  modified_base 19: mod_base = OTHER; note = Locked nucleic acid with phosphorothioate linkage
  modified_base 20: mod_base = OTHER; note = 2'-O-methoxyethyl 5-methylcytosine
  misc_feature 1..5: note = RNA
  misc_feature 6..15: note = DNA
  misc_feature 16..20: note = RNA
gcagaggtgangcgaagtgc

SEQ ID NO: 1251 - DNA, 20 bp, synthetic construct
  source 1..20: mol_type = other DNA
  modified_base 1: mod_base = OTHER; note = 2'-O-methoxyethyl modified nucleotide with phosphorothioate linkage
  modified_base 2: mod_base = OTHER; note = 2'-O-methoxyethyl 5-methylcytosine with phosphorothioate linkage
  modified_base 3: mod_base = OTHER; note = Locked nucleic acid with phosphorothioate linkage
  modified_base 4: mod_base = OTHER; note = 2'-O-methoxyethyl modified nucleotide with phosphorothioate linkage
  modified_base 5: mod_base = OTHER; note = 2'-O-methoxyethyl modified nucleotide with phosphorothioate linkage
  modified_base 6: mod_base = OTHER; note = Nucleotide with phosphorothioate linkage
  modified_base 7: mod_base = OTHER; note = Nucleotide with phosphorothioate linkage
  modified_base 8: mod_base = OTHER; note = Thymine with phosphorothioate linkage
  modified_base 9: mod_base = OTHER; note = Nucleotide with phosphorothioate linkage
  modified_base 10: mod_base = OTHER; note = Nucleotide with phosphorothioate linkage
  modified_base 11: mod_base = OTHER; note = Abasic nucleotide with a phosphorothioate linkage
  modified_base 12: mod_base = OTHER; note = Nucleotide with phosphorothioate linkage
  modified_base 13: mod_base = OTHER; note = 5-methylcytosine with phosphorothioate linkage
  modified_base 14: mod_base = OTHER; note = Nucleotide with phosphorothioate linkage
  modified_base 15: mod_base = OTHER; note = Nucleotide with phosphorothioate linkage
  modified_base 16: mod_base = OTHER; note = 2'-O-methoxyethyl modified nucleotide with phosphorothioate linkage
  modified_base 17: mod_base = OTHER; note = 2'-O-methoxyethyl modified nucleotide with phosphorothioate linkage
  modified_base 18: mod_base = OTHER; note = 2'-O-methoxyethyl modified thymine with phosphorothioate linkage
  modified_base 19: mod_base = OTHER; note = 2'-O-methoxyethyl modified nucleotide with phosphorothioate linkage
  modified_base 20: mod_base = OTHER; note = Locked 5-methylcytosine
  misc_feature 1..5: note = RNA
  misc_feature 6..15: note = DNA
  misc_feature 16..20: note = RNA
gcagaggtgangcgaagtgc

SEQ ID NO: 1252 - DNA, 20 bp, synthetic construct
  source 1..20: mol_type = other DNA
  modified_base 1: mod_base = OTHER; note = 2'-O-methoxyethyl modified nucleotide with phosphorothioate linkage
  modified_base 2: mod_base = OTHER; note = 2'-O-methoxyethyl 5-methylcytosine with phosphorothioate linkage
  modified_base 3: mod_base = OTHER; note = 2'-O-methoxyethyl modified nucleotide with phosphorothioate linkage
  modified_base 4: mod_base = OTHER; note = Locked nucleic acid with phosphorothioate linkage
  modified_base 5: mod_base = OTHER; note = 2'-O-methoxyethyl modified nucleotide with phosphorothioate linkage
  modified_base 6: mod_base = OTHER; note = Nucleotide with phosphorothioate linkage
  modified_base 7: mod_base = OTHER; note = Nucleotide with phosphorothioate linkage
  modified_base 8: mod_base = OTHER; note = Thymine with phosphorothioate linkage
  modified_base 9: mod_base = OTHER; note = Nucleotide with phosphorothioate linkage
  modified_base 10: mod_base = OTHER; note = Nucleotide with phosphorothioate linkage
  modified_base 11: mod_base = OTHER; note = Abasic nucleotide with a phosphorothioate linkage
  modified_base 12: mod_base = OTHER; note = Nucleotide with phosphorothioate linkage
  modified_base 13: mod_base = OTHER; note = 5-methylcytosine with phosphorothioate linkage
  modified_base 14: mod_base = OTHER; note = Nucleotide with phosphorothioate linkage
  modified_base 15: mod_base = OTHER; note = Nucleotide with phosphorothioate linkage
  modified_base 16: mod_base = OTHER; note = 2'-O-methoxyethyl modified nucleotide with phosphorothioate linkage
  modified_base 17: mod_base = OTHER; note = Locked nucleic acid with phosphorothioate linkage
  modified_base 18: mod_base = OTHER; note = 2'-O-methoxyethyl modified thymine with phosphorothioate linkage
  modified_base 19: mod_base = OTHER; note = 2'-O-methoxyethyl modified nucleotide with phosphorothioate linkage
  modified_base 20: mod_base = OTHER; note = 2'-O-methoxyethyl 5-methylcytosine
  misc_feature 1..5: note = RNA
  misc_feature 6..15: note = DNA
  misc_feature 16..20: note = RNA
gcagaggtgangcgaagtgc

SEQ ID NO: 1253 - DNA, 20 bp, synthetic construct
  source 1..20: mol_type = other DNA
  modified_base 1: mod_base = OTHER; note = 2'-O-methoxyethyl modified nucleotide with phosphorothioate linkage
  modified_base 2: mod_base = OTHER; note = 2'-O-methoxyethyl 5-methylcytosine with phosphorothioate linkage
  modified_base 3: mod_base = OTHER; note = 2'-O-methoxyethyl modified nucleotide with phosphorothioate linkage
  modified_base 4: mod_base = OTHER; note = Locked nucleic acid with phosphorothioate linkage
  modified_base 5: mod_base = OTHER; note = 2'-O-methoxyethyl modified nucleotide with phosphorothioate linkage
  modified_base 6: mod_base = OTHER; note = Nucleotide with phosphorothioate linkage
  modified_base 7: mod_base = OTHER; note = Nucleotide with phosphorothioate linkage
  modified_base 8: mod_base = OTHER; note = Thymine with phosphorothioate linkage
  modified_base 9: mod_base = OTHER; note = Nucleotide with phosphorothioate linkage
  modified_base 10: mod_base = OTHER; note = Nucleotide with phosphorothioate linkage
  modified_base 11: mod_base = OTHER; note = Abasic nucleotide with a phosphorothioate linkage
  modified_base 12: mod_base = OTHER; note = Nucleotide with phosphorothioate linkage
  modified_base 13: mod_base = OTHER; note = 5-methylcytosine with phosphorothioate linkage
  modified_base 14: mod_base = OTHER; note = Nucleotide with phosphorothioate linkage
  modified_base 15: mod_base = OTHER; note = Nucleotide with phosphorothioate linkage
  modified_base 16: mod_base = OTHER; note = 2'-O-methoxyethyl modified nucleotide with phosphorothioate linkage
  modified_base 17: mod_base = OTHER; note = 2'-O-methoxyethyl modified nucleotide with phosphorothioate linkage
  modified_base 18: mod_base = OTHER; note = 2'-O-methoxyethyl modified thymine with phosphorothioate linkage
  modified_base 19: mod_base = OTHER; note = Locked nucleic acid with phosphorothioate linkage
  modified_base 20: mod_base = OTHER; note = 2'-O-methoxyethyl 5-methylcytosine
  misc_feature 1..5: note = RNA
  misc_feature 6..15: note = DNA
  misc_feature 16..20: note = RNA
gcagaggtgangcgaagtgc

SEQ ID NO: 1254 - DNA, 20 bp, synthetic construct
  source 1..20: mol_type = other DNA
  modified_base 1: mod_base = OTHER; note = 2'-O-methoxyethyl modified nucleotide with phosphorothioate linkage
  modified_base 2: mod_base = OTHER; note = 2'-O-methoxyethyl 5-methylcytosine with phosphorothioate linkage
  modified_base 3: mod_base = OTHER; note = 2'-O-methoxyethyl modified nucleotide with phosphorothioate linkage
  modified_base 4: mod_base = OTHER; note = Locked nucleic acid with phosphorothioate linkage
  modified_base 5: mod_base = OTHER; note = 2'-O-methoxyethyl modified nucleotide with phosphorothioate linkage
  modified_base 6: mod_base = OTHER; note = Nucleotide with phosphorothioate linkage
  modified_base 7: mod_base = OTHER; note = Nucleotide with phosphorothioate linkage
  modified_base 8: mod_base = OTHER; note = Thymine with phosphorothioate linkage
  modified_base 9: mod_base = OTHER; note = Nucleotide with phosphorothioate linkage
  modified_base 10: mod_base = OTHER; note = Nucleotide with phosphorothioate linkage
  modified_base 11: mod_base = OTHER; note = Abasic nucleotide with a phosphorothioate linkage
  modified_base 12: mod_base = OTHER; note = Nucleotide with phosphorothioate linkage
  modified_base 13: mod_base = OTHER; note = 5-methylcytosine with phosphorothioate linkage
  modified_base 14: mod_base = OTHER; note = Nucleotide with phosphorothioate linkage
  modified_base 15: mod_base = OTHER; note = Nucleotide with phosphorothioate linkage
  modified_base 16: mod_base = OTHER; note = 2'-O-methoxyethyl modified nucleotide with phosphorothioate linkage
  modified_base 17: mod_base = OTHER; note = 2'-O-methoxyethyl modified nucleotide with phosphorothioate linkage
  modified_base 18: mod_base = OTHER; note = 2'-O-methoxyethyl modified thymine with phosphorothioate linkage
  modified_base 19: mod_base = OTHER; note = 2'-O-methoxyethyl modified nucleotide with phosphorothioate linkage
  modified_base 20: mod_base = OTHER; note = Locked 5-methylcytosine
  misc_feature 1..5: note = RNA
  misc_feature 6..15: note = DNA
  misc_feature 16..20: note = RNA
gcagaggtgangcgaagtgc

SEQ ID NO: 1255 - DNA, 20 bp, synthetic construct
  source 1..20: mol_type = other DNA
  modified_base 1: mod_base = OTHER; note = 2'-O-methoxyethyl modified nucleotide with phosphorothioate linkage
  modified_base 2: mod_base = OTHER; note = 2'-O-methoxyethyl 5-methylcytosine with phosphorothioate linkage
  modified_base 3: mod_base = OTHER; note = 2'-O-methoxyethyl modified nucleotide with phosphorothioate linkage
  modified_base 4: mod_base = OTHER; note = 2'-O-methoxyethyl modified nucleotide with phosphorothioate linkage
  modified_base 5: mod_base = OTHER; note = Locked nucleic acid with phosphorothioate linkage
  modified_base 6: mod_base = OTHER; note = Nucleotide with phosphorothioate linkage
  modified_base 7: mod_base = OTHER; note = Nucleotide with phosphorothioate linkage
  modified_base 8: mod_base = OTHER; note = Thymine with phosphorothioate linkage
  modified_base 9: mod_base = OTHER; note = Nucleotide with phosphorothioate linkage
  modified_base 10: mod_base = OTHER; note = Nucleotide with phosphorothioate linkage
  modified_base 11: mod_base = OTHER; note = Abasic nucleotide with a phosphorothioate linkage
  modified_base 12: mod_base = OTHER; note = Nucleotide with phosphorothioate linkage
  modified_base 13: mod_base = OTHER; note = 5-methylcytosine with phosphorothioate linkage
  modified_base 14: mod_base = OTHER; note = Nucleotide with phosphorothioate linkage
  modified_base 15: mod_base = OTHER; note = Nucleotide with phosphorothioate linkage
  modified_base 16: mod_base = OTHER; note = 2'-O-methoxyethyl modified nucleotide with phosphorothioate linkage
  modified_base 17: mod_base = OTHER; note = Locked nucleic acid with phosphorothioate linkage
  modified_base 18: mod_base = OTHER; note = 2'-O-methoxyethyl modified thymine with phosphorothioate linkage
  modified_base 19: mod_base = OTHER; note = 2'-O-methoxyethyl modified nucleotide with phosphorothioate linkage
  modified_base 20: mod_base = OTHER; note = 2'-O-methoxyethyl 5-methylcytosine
  misc_feature 1..5: note = RNA
  misc_feature 6..15: note = DNA
  misc_feature 16..20: note = RNA
gcagaggtgangcgaagtgc

SEQ ID NO: 1256 - DNA, 20 bp, synthetic construct
  source 1..20: mol_type = other DNA
  modified_base 1: mod_base = OTHER; note = 2'-O-methoxyethyl modified nucleotide with phosphorothioate linkage
  modified_base 2: mod_base = OTHER; note = 2'-O-methoxyethyl 5-methylcytosine with phosphorothioate linkage
  modified_base 3: mod_base = OTHER; note = 2'-O-methoxyethyl modified nucleotide with phosphorothioate linkage
  modified_base 4: mod_base = OTHER; note = 2'-O-methoxyethyl modified nucleotide with phosphorothioate linkage
  modified_base 5: mod_base = OTHER; note = 2'-O-methoxyethyl modified nucleotide with phosphorothioate linkage
  modified_base 6: mod_base = OTHER; note = Nucleotide with phosphorothioate linkage
  modified_base 7: mod_base = OTHER; note = Nucleotide with phosphorothioate linkage
  modified_base 8: mod_base = OTHER; note = Thymine with phosphorothioate linkage
  modified_base 9: mod_base = OTHER; note = Nucleotide with phosphorothioate linkage
  modified_base 10: mod_base = OTHER; note = Nucleotide with phosphorothioate linkage
  modified_base 11: mod_base = OTHER; note = Abasic nucleotide with a phosphorothioate linkage
  modified_base 12: mod_base = OTHER; note = Nucleotide with phosphorothioate linkage
  modified_base 13: mod_base = OTHER; note = 5-methylcytosine with phosphorothioate linkage
  modified_base 14: mod_base = OTHER; note = Nucleotide with phosphorothioate linkage
  modified_base 15: mod_base = OTHER; note = Nucleotide with phosphorothioate linkage
  modified_base 16: mod_base = OTHER; note = Locked nucleic acid with phosphorothioate linkage
  modified_base 17: mod_base = OTHER; note = 2'-O-methoxyethyl modified nucleotide with phosphorothioate linkage
  modified_base 18: mod_base = OTHER; note = 2'-O-methoxyethyl modified thymine with phosphorothioate linkage
  modified_base 19: mod_base = OTHER; note = 2'-O-methoxyethyl modified nucleotide with phosphorothioate linkage
  modified_base 20: mod_base = OTHER; note = Locked 5-methylcytosine
  misc_feature 1..5: note = RNA
  misc_feature 6..15: note = DNA
  misc_feature 16..20: note = RNA
gcagaggtgangcgaagtgc

SEQ ID NO: 1257 - DNA, 20 bp, synthetic construct
  source 1..20: mol_type = other DNA
  modified_base 1: mod_base = OTHER; note = 2'-O-methoxyethyl modified nucleotide with phosphorothioate linkage
  modified_base 2: mod_base = OTHER; note = 2'-O-methoxyethyl 5-methylcytosine with phosphorothioate linkage
  modified_base 3: mod_base = OTHER; note = 2'-O-methoxyethyl modified nucleotide with phosphorothioate linkage
  modified_base 4: mod_base = OTHER; note = 2'-O-methoxyethyl modified nucleotide with phosphorothioate linkage
  modified_base 5: mod_base = OTHER; note = 2'-O-methoxyethyl modified nucleotide with phosphorothioate linkage
  modified_base 6: mod_base = OTHER; note = Nucleotide with phosphorothioate linkage
  modified_base 7: mod_base = OTHER; note = Nucleotide with phosphorothioate linkage
  modified_base 8: mod_base = OTHER; note = Thymine with phosphorothioate linkage
  modified_base 9: mod_base = OTHER; note = Nucleotide with phosphorothioate linkage
  modified_base 10: mod_base = OTHER; note = Nucleotide with phosphorothioate linkage
  modified_base 11: mod_base = OTHER; note = Abasic nucleotide with a phosphorothioate linkage
  modified_base 12: mod_base = OTHER; note = Nucleotide with phosphorothioate linkage
  modified_base 13: mod_base = OTHER; note = 5-methylcytosine with phosphorothioate linkage
  modified_base 14: mod_base = OTHER; note = Nucleotide with phosphorothioate linkage
  modified_base 15: mod_base = OTHER; note = Nucleotide with phosphorothioate linkage
  modified_base 16: mod_base = OTHER; note = 2'-O-methoxyethyl modified nucleotide with phosphorothioate linkage
  modified_base 17: mod_base = OTHER; note = Locked nucleic acid with phosphorothioate linkage
  modified_base 18: mod_base = OTHER; note = Locked thymine with phosphorothioate linkage
  modified_base 19: mod_base = OTHER; note = 2'-O-methoxyethyl modified nucleotide with phosphorothioate linkage
  modified_base 20: mod_base = OTHER; note = 2'-O-methoxyethyl 5-methylcytosine
  misc_feature 1..5: note = RNA
  misc_feature 6..15: note = DNA
  misc_feature 16..20: note = RNA
gcagaggtgangcgaagtgc

SEQ ID NO: 1258 - DNA, 20 bp, synthetic construct
  source 1..20: mol_type = other DNA
  modified_base 1: mod_base = OTHER; note = 2'-O-methoxyethyl modified nucleotide with phosphorothioate linkage
  modified_base 2: mod_base = OTHER; note = 2'-O-methoxyethyl 5-methylcytosine with phosphorothioate linkage
  modified_base 3: mod_base = OTHER; note = 2'-O-methoxyethyl modified nucleotide with phosphorothioate linkage
  modified_base 4: mod_base = OTHER; note = 2'-O-methoxyethyl modified nucleotide with phosphorothioate linkage
  modified_base 5: mod_base = OTHER; note = 2'-O-methoxyethyl modified nucleotide with phosphorothioate linkage
  modified_base 6: mod_base = OTHER; note = Nucleotide with phosphorothioate linkage
  modified_base 7: mod_base = OTHER; note = Nucleotide with phosphorothioate linkage
  modified_base 8: mod_base = OTHER; note = Thymine with phosphorothioate linkage
  modified_base 9: mod_base = OTHER; note = Nucleotide with phosphorothioate linkage
  modified_base 10: mod_base = OTHER; note = Nucleotide with phosphorothioate linkage
  modified_base 11: mod_base = OTHER; note = Abasic nucleotide with a phosphorothioate linkage
  modified_base 12: mod_base = OTHER; note = Nucleotide with phosphorothioate linkage
  modified_base 13: mod_base = OTHER; note = 5-methylcytosine with phosphorothioate linkage
  modified_base 14: mod_base = OTHER; note = Nucleotide with phosphorothioate linkage
  modified_base 15: mod_base = OTHER; note = Nucleotide with phosphorothioate linkage
  modified_base 16: mod_base = OTHER; note = 2'-O-methoxyethyl modified nucleotide with phosphorothioate linkage
  modified_base 17: mod_base = OTHER; note = Locked nucleic acid with phosphorothioate linkage
  modified_base 18: mod_base = OTHER; note = 2'-O-methoxyethyl modified thymine with phosphorothioate linkage
  modified_base 19: mod_base = OTHER; note = Locked nucleic acid with phosphorothioate linkage
  modified_base 20: mod_base = OTHER; note = 2'-O-methoxyethyl 5-methylcytosine
  misc_feature 1..5: note = RNA
  misc_feature 6..15: note = DNA
  misc_feature 16..20: note = RNA
gcagaggtgangcgaagtgc

SEQ ID NO: 1259 - DNA, 20 bp, synthetic construct
  source 1..20: mol_type = other DNA
  modified_base 1: mod_base = OTHER; note = 2'-O-methoxyethyl modified nucleotide with phosphorothioate linkage
  modified_base 2: mod_base = OTHER; note = 2'-O-methoxyethyl 5-methylcytosine with phosphorothioate linkage
  modified_base 3: mod_base = OTHER; note = 2'-O-methoxyethyl modified nucleotide with phosphorothioate linkage
  modified_base 4: mod_base = OTHER; note = 2'-O-methoxyethyl modified nucleotide with phosphorothioate linkage
  modified_base 5: mod_base = OTHER; note = 2'-O-methoxyethyl modified nucleotide with phosphorothioate linkage
  modified_base 6: mod_base = OTHER; note = Nucleotide with phosphorothioate linkage
  modified_base 7: mod_base = OTHER; note = Nucleotide with phosphorothioate linkage
  modified_base 8: mod_base = OTHER; note = Thymine with phosphorothioate linkage
  modified_base 9: mod_base = OTHER; note = Nucleotide with phosphorothioate linkage
  modified_base 10: mod_base = OTHER; note = Nucleotide with phosphorothioate linkage
  modified_base 11: mod_base = OTHER; note = Abasic nucleotide with a phosphorothioate linkage
  modified_base 12: mod_base = OTHER; note = Nucleotide with phosphorothioate linkage
  modified_base 13: mod_base = OTHER; note = 5-methylcytosine with phosphorothioate linkage
  modified_base 14: mod_base = OTHER; note = Nucleotide with phosphorothioate linkage
  modified_base 15: mod_base = OTHER; note = Nucleotide with phosphorothioate linkage
  modified_base 16: mod_base = OTHER; note = 2'-O-methoxyethyl modified nucleotide with phosphorothioate linkage
  modified_base 17: mod_base = OTHER; note = Locked nucleic acid with phosphorothioate linkage
  modified_base 18: mod_base = OTHER; note = 2'-O-methoxyethyl modified thymine with phosphorothioate linkage
  modified_base 19: mod_base = OTHER; note = 2'-O-methoxyethyl modified nucleotide with phosphorothioate linkage
  modified_base 20: mod_base = OTHER; note = Locked 5-methylcytosine
  misc_feature 1..5: note = RNA
  misc_feature 6..15: note = DNA
  misc_feature 16..20: note = RNA
gcagaggtgangcgaagtgc

SEQ ID NO: 1260 - DNA, 20 bp, synthetic construct
  source 1..20: mol_type = other DNA
  modified_base 1: mod_base = OTHER; note = 2'-O-methoxyethyl modified nucleotide with phosphorothioate linkage
  modified_base 2: mod_base = OTHER; note = 2'-O-methoxyethyl 5-methylcytosine with phosphorothioate linkage
  modified_base 3: mod_base = OTHER; note = 2'-O-methoxyethyl modified nucleotide with phosphorothioate linkage
  modified_base 4: mod_base = OTHER; note = 2'-O-methoxyethyl modified nucleotide with phosphorothioate linkage
  modified_base 5: mod_base = OTHER; note = 2'-O-methoxyethyl modified nucleotide with phosphorothioate linkage
  modified_base 6: mod_base = OTHER; note = Nucleotide with phosphorothioate linkage
  modified_base 7: mod_base = OTHER; note = Nucleotide with phosphorothioate linkage
  modified_base 8: mod_base = OTHER; note = Thymine with phosphorothioate linkage
  modified_base 9: mod_base = OTHER; note = Nucleotide with phosphorothioate linkage
  modified_base 10: mod_base = OTHER; note = Nucleotide with phosphorothioate linkage
  modified_base 11: mod_base = OTHER; note = Abasic nucleotide with a phosphorothioate linkage
  modified_base 12: mod_base = OTHER; note = Nucleotide with phosphorothioate linkage
  modified_base 13: mod_base = OTHER; note = 5-methylcytosine with phosphorothioate linkage
  modified_base 14: mod_base = OTHER; note = Nucleotide with phosphorothioate linkage
  modified_base 15: mod_base = OTHER; note = Nucleotide with phosphorothioate linkage
  modified_base 16: mod_base = OTHER; note = 2'-O-methoxyethyl modified nucleotide with phosphorothioate linkage
  modified_base 17: mod_base = OTHER; note = 2'-O-methoxyethyl modified nucleotide with phosphorothioate linkage
  modified_base 18: mod_base = OTHER; note = 2'-O-methoxyethyl modified thymine with phosphorothioate linkage
  modified_base 19: mod_base = OTHER; note = Locked nucleic acid with phosphorothioate linkage
  modified_base 20: mod_base = OTHER; note = Locked 5-methylcytosine
  misc_feature 1..5: note = RNA
  misc_feature 6..15: note = DNA
  misc_feature 16..20: note = RNA
gcagaggtgangcgaagtgc

SEQ ID NO: 1261 - DNA, 20 bp, synthetic construct
  source 1..20: mol_type = other DNA
  modified_base 1: mod_base = OTHER; note = 2'-O-methoxyethyl modified nucleotide with phosphorothioate linkage
  modified_base 2: mod_base = OTHER; note = 2'-O-methoxyethyl 5-methylcytosine with phosphorothioate linkage
  modified_base 3: mod_base = OTHER; note = 2'-O-methoxyethyl modified nucleotide with phosphorothioate linkage
  modified_base 4: mod_base = OTHER; note = 2'-O-methoxyethyl modified nucleotide with phosphorothioate linkage
  modified_base 5: mod_base = OTHER; note = Locked nucleic acid with phosphorothioate linkage
  modified_base 6: mod_base = OTHER; note = Nucleotide with phosphorothioate linkage
  modified_base 7: mod_base = OTHER; note = Nucleotide with phosphorothioate linkage
  modified_base 8: mod_base = OTHER; note = Thymine with phosphorothioate linkage
  modified_base 9: mod_base = OTHER; note = Nucleotide with phosphorothioate linkage
  modified_base 10: mod_base = OTHER; note = Nucleotide with phosphorothioate linkage
  modified_base 11: mod_base = OTHER; note = 2'-O-methyl modified abasic nucleotide with phosphorothioate linkage
  modified_base 12: mod_base = OTHER; note = Nucleotide with phosphorothioate linkage
  modified_base 13: mod_base = OTHER; note = 5-methylcytosine with phosphorothioate linkage
  modified_base 14: mod_base = OTHER; note = Nucleotide with phosphorothioate linkage
  modified_base 15: mod_base = OTHER; note = Nucleotide with phosphorothioate linkage
  modified_base 16: mod_base = OTHER; note = 2'-O-methoxyethyl modified nucleotide with phosphorothioate linkage
  modified_base 17: mod_base = OTHER; note = 2'-O-methoxyethyl modified nucleotide with phosphorothioate linkage
  modified_base 18: mod_base = OTHER; note = Locked thymine with phosphorothioate linkage
  modified_base 19: mod_base = OTHER; note = 2'-O-methoxyethyl modified nucleotide with phosphorothioate linkage
  modified_base 20: mod_base = OTHER; note = 2'-O-methoxyethyl 5-methylcytosine
  misc_feature 1..5: note = RNA
  misc_feature 6..10: note = DNA
  misc_feature 11: note = RNA
  misc_feature 12..15: note = DNA
  misc_feature 16..20: note = RNA
gcagaggtgangcgaagtgc

SEQ ID NO: 1262 - DNA, 20 bp, synthetic construct
  source 1..20: mol_type = other DNA
  modified_base 1: mod_base = OTHER; note = 2'-O-methoxyethyl modified nucleotide with phosphorothioate linkage
  modified_base 2: mod_base = OTHER; note = 2'-O-methoxyethyl 5-methylcytosine with phosphorothioate linkage
  modified_base 3: mod_base = OTHER; note = 2'-O-methoxyethyl modified nucleotide with phosphorothioate linkage
  modified_base 4: mod_base = OTHER; note = Locked nucleic acid with phosphorothioate linkage
  modified_base 5: mod_base = OTHER; note = 2'-O-methoxyethyl modified nucleotide with phosphorothioate linkage
  modified_base 6: mod_base = OTHER; note = Nucleotide with phosphorothioate linkage
  modified_base 7: mod_base = OTHER; note = Nucleotide with phosphorothioate linkage
  modified_base 8: mod_base = OTHER; note = Thymine with phosphorothioate linkage
  modified_base 9: mod_base = OTHER; note = Nucleotide with phosphorothioate linkage
  modified_base 10: mod_base = OTHER; note = Nucleotide with phosphorothioate linkage
  modified_base 11: mod_base = OTHER; note = Abasic nucleotide with a phosphorothioate linkage
  modified_base 12: mod_base = OTHER; note = Nucleotide with phosphorothioate linkage
  modified_base 13: mod_base = OTHER; note = 5-methylcytosine with phosphorothioate linkage
  modified_base 14: mod_base = OTHER; note = Nucleotide with phosphorothioate linkage
  modified_base 15: mod_base = OTHER; note = Nucleotide with phosphorothioate linkage
  modified_base 16: mod_base = OTHER; note = Locked nucleic acid with phosphorothioate linkage
  modified_base 17: mod_base = OTHER; note = 2'-O-methoxyethyl modified nucleotide with phosphorothioate linkage
  modified_base 18: mod_base = OTHER; note = 2'-O-methoxyethyl modified thymine with phosphorothioate linkage
  modified_base 19: mod_base = OTHER; note = 2'-O-methoxyethyl modified nucleotide with phosphorothioate linkage
  modified_base 20: mod_base = OTHER; note = 2'-O-methoxyethyl 5-methylcytosine
  misc_feature 1..5: note = RNA
  misc_feature 6..15: note = DNA
  misc_feature 16..20: note = RNA
gcagaggtgangcgaagtgc

SEQ ID NO: 1263 - DNA, 20 bp, synthetic construct
  source 1..20: mol_type = other DNA
  modified_base 1: mod_base = OTHER; note = 2'-O-methoxyethyl modified nucleotide with phosphorothioate linkage
  modified_base 2: mod_base = OTHER; note = 2'-O-methoxyethyl 5-methylcytosine with phosphorothioate linkage
  modified_base 3: mod_base = OTHER; note = 2'-O-methoxyethyl modified nucleotide with phosphorothioate linkage
  modified_base 4: mod_base = OTHER; note = 2'-O-methoxyethyl modified nucleotide with phosphorothioate linkage
  modified_base 5: mod_base = OTHER; note = 2'-O-methoxyethyl modified nucleotide with phosphorothioate linkage
  modified_base 6: mod_base = OTHER; note = Nucleotide with phosphorothioate linkage
  modified_base 7: mod_base = OTHER; note = Nucleotide with phosphorothioate linkage
  modified_base 8: mod_base = OTHER; note = Thymine with phosphorothioate linkage
  modified_base 9: mod_base = OTHER; note = Nucleotide with phosphorothioate linkage
  modified_base 10: mod_base = OTHER; note = Nucleotide with phosphorothioate linkage
  modified_base 11: mod_base = OTHER; note = Abasic nucleotide with a phosphorothioate linkage
  modified_base 12: mod_base = OTHER; note = Nucleotide with phosphorothioate linkage
  modified_base 13: mod_base = OTHER; note = 5-methylcytosine with phosphorothioate linkage
  modified_base 14: mod_base = OTHER; note = Nucleotide with phosphorothioate linkage
  modified_base 15: mod_base = OTHER; note = Nucleotide with phosphorothioate linkage
  modified_base 16: mod_base = OTHER; note = Locked nucleic acid with phosphorothioate linkage
  modified_base 17: mod_base = OTHER; note = 2'-O-methoxyethyl modified nucleotide with phosphorothioate linkage
  modified_base 18: mod_base = OTHER; note = Locked thymine with phosphorothioate linkage
  modified_base 19: mod_base = OTHER; note = 2'-O-methoxyethyl modified nucleotide with phosphorothioate linkage
  modified_base 20: mod_base = OTHER; note = 2'-O-methoxyethyl 5-methylcytosine
  misc_feature 1..5: note = RNA
  misc_feature 6..15: note = DNA
  misc_feature 16..20: note = RNA
gcagaggtgangcgaagtgc

SEQ ID NO: 1264 - DNA, 20 bp, synthetic construct
  source 1..20: mol_type = other DNA
  modified_base 1: mod_base = OTHER; note = 2'-O-methoxyethyl modified nucleotide with phosphorothioate linkage
  modified_base 2: mod_base = OTHER; note = Locked 5-methylcytosine with phosphorothioate linkage
  modified_base 3: mod_base = OTHER; note = 2'-O-methoxyethyl modified nucleotide with phosphorothioate linkage
  modified_base 4: mod_base = OTHER; note = 2'-O-methoxyethyl modified nucleotide with phosphorothioate linkage
  modified_base 5: mod_base = OTHER; note = 2'-O-methoxyethyl modified nucleotide with phosphorothioate linkage
  modified_base 6: mod_base = OTHER; note = Nucleotide with phosphorothioate linkage
  modified_base 7: mod_base = OTHER; note = Nucleotide with phosphorothioate linkage
  modified_base 8: mod_base = OTHER; note = Thymine with phosphorothioate linkage
  modified_base 9: mod_base = OTHER; note = Nucleotide with phosphorothioate linkage
  modified_base 10: mod_base = OTHER; note = Nucleotide with phosphorothioate linkage
  modified_base 11: mod_base = OTHER; note = 2'-O-methyl modified abasic nucleotide with phosphorothioate linkage
  modified_base 12: mod_base = OTHER; note = Nucleotide with phosphorothioate linkage
  modified_base 13: mod_base = OTHER; note = 5-methylcytosine with phosphorothioate linkage
  modified_base 14: mod_base = OTHER; note = Nucleotide with phosphorothioate linkage
  modified_base 15: mod_base = OTHER; note = Nucleotide with phosphorothioate linkage
  modified_base 16: mod_base = OTHER; note = Locked nucleic acid with phosphorothioate linkage
  modified_base 17: mod_base = OTHER; note = 2'-O-methoxyethyl modified nucleotide with phosphorothioate linkage
  modified_base 18: mod_base = OTHER; note = 2'-O-methoxyethyl modified thymine with phosphorothioate linkage
  modified_base 19: mod_base = OTHER; note = 2'-O-methoxyethyl modified nucleotide with phosphorothioate linkage
  modified_base 20: mod_base = OTHER; note = 2'-O-methoxyethyl 5-methylcytosine
  misc_feature 1..5: note = RNA
  misc_feature 6..10: note = DNA
  misc_feature 11: note = RNA
  misc_feature 12..15: note = DNA
  misc_feature 16..20: note = RNA
gcagaggtgangcgaagtgc

SEQ ID NO: 1265 - DNA, 20 bp, synthetic construct
  source 1..20: mol_type = other DNA
  modified_base 1: mod_base = OTHER; note = 2'-O-methoxyethyl modified nucleotide with phosphorothioate linkage
  modified_base 2: mod_base = OTHER; note = 2'-O-methoxyethyl 5-methylcytosine with phosphorothioate linkage
  modified_base 3: mod_base = OTHER; note = 2'-O-methoxyethyl modified nucleotide with phosphorothioate linkage
  modified_base 4: mod_base = OTHER; note = 2'-O-methoxyethyl modified nucleotide with phosphorothioate linkage
  modified_base 5: mod_base = OTHER; note = 2'-O-methoxyethyl modified nucleotide with phosphorothioate linkage
  modified_base 6: mod_base = OTHER; note = Nucleotide with phosphorothioate linkage
  modified_base 7: mod_base = OTHER; note = Nucleotide with phosphorothioate linkage
  modified_base 8: mod_base = OTHER; note = Thymine with phosphorothioate linkage
  modified_base 9: mod_base = OTHER; note = Nucleotide with phosphorothioate linkage
  modified_base 10: mod_base = OTHER; note = Nucleotide with phosphorothioate linkage
  modified_base 11: mod_base = OTHER; note = Abasic nucleotide with a phosphorothioate linkage
  modified_base 12: mod_base = OTHER; note = Nucleotide with phosphorothioate linkage
  modified_base 13: mod_base = OTHER; note = 5-methylcytosine with phosphorothioate linkage
  modified_base 14: mod_base = OTHER; note = Nucleotide with phosphorothioate linkage
  modified_base 15: mod_base = OTHER; note = Nucleotide with phosphorothioate linkage
  modified_base 16: mod_base = OTHER; note = 2'-O-methoxyethyl modified nucleotide with phosphorothioate linkage
  modified_base 17: mod_base = OTHER; note = 2'-O-methoxyethyl modified nucleotide with phosphorothioate linkage
  modified_base 18: mod_base = OTHER; note = 2'-O-methoxyethyl modified thymine with phosphorothioate linkage
  modified_base 19: mod_base = OTHER; note = 2'-O-methoxyethyl modified nucleotide with phosphorothioate linkage
  modified_base 20: mod_base = OTHER; note = 2'-O-methoxyethyl 5-methylcytosine
  misc_feature 1..5: note = RNA
  misc_feature 6..15: note = DNA
  misc_feature 16..20: note = RNA
gcagaggtgangcgaagtgc

SEQ ID NO: 1266 - DNA, 20 bp, synthetic construct
  source 1..20: mol_type = other DNA
  modified_base 1: mod_base = OTHER; note = 2'-O-methoxyethyl modified nucleotide with phosphorothioate linkage
  modified_base 2: mod_base = OTHER; note = 2'-O-methoxyethyl 5-methylcytosine with phosphorothioate linkage
  modified_base 3: mod_base = OTHER; note = 2'-O-methoxyethyl modified nucleotide with phosphorothioate linkage
  modified_base 4: mod_base = OTHER; note = 2'-O-methoxyethyl modified nucleotide with phosphorothioate linkage
  modified_base 5: mod_base = OTHER; note = Locked nucleic acid with phosphorothioate linkage
  modified_base 6: mod_base = OTHER; note = Nucleotide with phosphorothioate linkage
  modified_base 7: mod_base = OTHER; note = Nucleotide with phosphorothioate linkage
  modified_base 8: mod_base = OTHER; note = Thymine with phosphorothioate linkage
  modified_base 9: mod_base = OTHER; note = Nucleotide with phosphorothioate linkage
  modified_base 10: mod_base = OTHER; note = Nucleotide with phosphorothioate linkage
  modified_base 11: mod_base = OTHER; note = Abasic nucleotide with a phosphorothioate linkage
  modified_base 12: mod_base = OTHER; note = Nucleotide with phosphorothioate linkage
  modified_base 13: mod_base = OTHER; note = 5-methylcytosine with phosphorothioate linkage
  modified_base 14: mod_base = OTHER; note = Nucleotide with phosphorothioate linkage
  modified_base 15: mod_base = OTHER; note = Nucleotide with phosphorothioate linkage
  modified_base 16: mod_base = OTHER; note = 2'-O-methoxyethyl modified nucleotide with phosphorothioate linkage
  modified_base 17: mod_base = OTHER; note = 2'-O-methoxyethyl modified nucleotide with phosphorothioate linkage
  modified_base 18: mod_base = OTHER; note = 2'-O-methoxyethyl modified thymine with phosphorothioate linkage
  modified_base 19: mod_base = OTHER; note = 2'-O-methoxyethyl modified nucleotide with phosphorothioate linkage
  modified_base 20: mod_base = OTHER; note = Locked 5-methylcytosine
  misc_feature 1..5: note = RNA
  misc_feature 6..15: note = DNA
  misc_feature 16..20: note = RNA
gcagaggtgangcgaagtgc

SEQ ID NO: 1267 - DNA, 20 bp, synthetic construct
  source 1..20: mol_type = other DNA
  modified_base 1: mod_base = OTHER; note = 2'-O-methoxyethyl modified nucleotide with phosphorothioate linkage
  modified_base 2: mod_base = OTHER; note = 2'-O-methoxyethyl 5-methylcytosine with phosphorothioate linkage
  modified_base 3: mod_base = OTHER; note = 2'-O-methoxyethyl modified nucleotide with phosphorothioate linkage
  modified_base 4: mod_base = OTHER; note = 2'-O-methoxyethyl modified nucleotide with phosphorothioate linkage
  modified_base 5: mod_base = OTHER; note = 2'-O-methoxyethyl modified nucleotide with phosphorothioate linkage
  modified_base 6: mod_base = OTHER; note = Nucleotide with phosphorothioate linkage
  modified_base 7: mod_base = OTHER; note = Nucleotide with phosphorothioate linkage
  modified_base 8: mod_base = OTHER; note = Thymine with phosphorothioate linkage
  modified_base 9: mod_base = OTHER; note = Nucleotide with phosphorothioate linkage
  modified_base 10: mod_base = OTHER; note = Nucleotide with phosphorothioate linkage
  modified_base 11: mod_base = OTHER; note = Abasic nucleotide with a phosphorothioate linkage
  modified_base 12: mod_base = OTHER; note = Nucleotide with phosphorothioate linkage
  modified_base 13: mod_base = OTHER; note = 5-methylcytosine with phosphorothioate linkage
  modified_base 14: mod_base = OTHER; note = Nucleotide with phosphorothioate linkage
  modified_base 15: mod_base = OTHER; note = Nucleotide with phosphorothioate linkage
  modified_base 16: mod_base = OTHER; note = Locked nucleic acid with phosphorothioate linkage
  modified_base 17: mod_base = OTHER; note = Locked nucleic acid with phosphorothioate linkage
  modified_base 18: mod_base = OTHER; note = 2'-O-methoxyethyl modified thymine with phosphorothioate linkage
  modified_base 19: mod_base = OTHER; note = 2'-O-methoxyethyl modified nucleotide with phosphorothioate linkage
  modified_base 20: mod_base = OTHER; note = 2'-O-methoxyethyl 5-methylcytosine
  misc_feature 1..5: note = RNA
  misc_feature 6..15: note = DNA
  misc_feature 16..20: note = RNA
gcagaggtgangcgaagtgc

SEQ ID NO: 1268 - DNA, 20 bp, synthetic construct
  source 1..20: mol_type = other DNA
  modified_base 1: mod_base = OTHER; note = 2'-O-methoxyethyl modified nucleotide with phosphorothioate linkage
  modified_base 2: mod_base = OTHER; note = 2'-O-methoxyethyl 5-methylcytosine with phosphorothioate linkage
  modified_base 3: mod_base = OTHER; note = 2'-O-methoxyethyl modified nucleotide with phosphorothioate linkage
  modified_base 4: mod_base = OTHER; note = 2'-O-methoxyethyl modified nucleotide with phosphorothioate linkage
  modified_base 5: mod_base = OTHER; note = 2'-O-methoxyethyl modified nucleotide with phosphorothioate linkage
  modified_base 6: mod_base = OTHER; note = Nucleotide with phosphorothioate linkage
  modified_base 7: mod_base = OTHER; note = Nucleotide with phosphorothioate linkage
  modified_base 8: mod_base = OTHER; note = Thymine with phosphorothioate linkage
  modified_base 9: mod_base = OTHER; note = Nucleotide with phosphorothioate linkage
  modified_base 10: mod_base = OTHER; note = Nucleotide with phosphorothioate linkage
  modified_base 11: mod_base = OTHER; note = 2'-O-methyl modified abasic nucleotide with phosphorothioate linkage
  modified_base 12: mod_base = OTHER; note = Nucleotide with phosphorothioate linkage
  modified_base 13: mod_base = OTHER; note = 5-methylcytosine with phosphorothioate linkage
  modified_base 14: mod_base = OTHER; note = Nucleotide with phosphorothioate linkage
  modified_base 15: mod_base = OTHER; note = Nucleotide with phosphorothioate linkage
  modified_base 16: mod_base = OTHER; note = Locked nucleic acid with phosphorothioate linkage
  modified_base 17: mod_base = OTHER; note = 2'-O-methoxyethyl modified nucleotide with phosphorothioate linkage
  modified_base 18: mod_base = OTHER; note = 2'-O-methoxyethyl modified thymine with phosphorothioate linkage
  modified_base 19: mod_base = OTHER; note = Locked nucleic acid with phosphorothioate linkage
  modified_base 20: mod_base = OTHER; note = 2'-O-methoxyethyl 5-methylcytosine
  misc_feature 1..5: note = RNA
  misc_feature 6..10: note = DNA
  misc_feature 11: note = RNA
  misc_feature 12..15: note = DNA
  misc_feature 16..20: note = RNA
gcagaggtgangcgaagtgc

SEQ ID NO: 1269 - DNA, 20 bp, synthetic construct
  source 1..20: mol_type = other DNA
  modified_base 1: mod_base = OTHER; note = 2'-O-methoxyethyl modified nucleotide with phosphorothioate linkage
  modified_base 2: mod_base = OTHER; note = 2'-O-methoxyethyl 5-methylcytosine with phosphorothioate linkage
  modified_base 3: mod_base = OTHER; note = Locked nucleic acid with phosphorothioate linkage
  modified_base 4: mod_base = OTHER; note = 2'-O-methoxyethyl modified nucleotide with phosphorothioate linkage
  modified_base 5: mod_base = OTHER; note = Locked nucleic acid with phosphorothioate linkage
  modified_base 6: mod_base = OTHER; note = Nucleotide with phosphorothioate linkage
  modified_base 7: mod_base = OTHER; note = Nucleotide with phosphorothioate linkage
  modified_base 8: mod_base = OTHER; note = Thymine with phosphorothioate linkage
  modified_base 9: mod_base = OTHER; note = Nucleotide with phosphorothioate linkage
  modified_base 10: mod_base = OTHER; note = Nucleotide with phosphorothioate linkage
  modified_base 11: mod_base = OTHER; note = Abasic nucleotide with a phosphorothioate linkage
  modified_base 12: mod_base = OTHER; note = Nucleotide with phosphorothioate linkage
  modified_base 13: mod_base = OTHER; note = 5-methylcytosine with phosphorothioate linkage
  modified_base 14: mod_base = OTHER; note = Nucleotide with phosphorothioate linkage
  modified_base 15: mod_base = OTHER; note = Nucleotide with phosphorothioate linkage
  modified_base 16: mod_base = OTHER; note = 2'-O-methoxyethyl modified nucleotide with phosphorothioate linkage
  modified_base 17: mod_base = OTHER; note = 2'-O-methoxyethyl modified nucleotide with phosphorothioate linkage
  modified_base 18: mod_base = OTHER; note = 2'-O-methoxyethyl modified thymine with phosphorothioate linkage
  modified_base 19: mod_base = OTHER; note = 2'-O-methoxyethyl modified nucleotide with phosphorothioate linkage
  modified_base 20: mod_base = OTHER; note = 2'-O-methoxyethyl 5-methylcytosine
  misc_feature 1..5: note = RNA
  misc_feature 6..15: note = DNA
  misc_feature 16..20: note = RNA
gcagaggtgangcgaagtgc

SEQ ID NO: 1270 - DNA, 20 bp, synthetic construct
  source 1..20: mol_type = other DNA
  modified_base 1: mod_base = OTHER; note = 2'-O-methoxyethyl modified nucleotide with phosphorothioate linkage
  modified_base 2: mod_base = OTHER; note = 2'-O-methoxyethyl 5-methylcytosine with phosphorothioate linkage
  modified_base 3: mod_base = OTHER; note = 2'-O-methoxyethyl modified nucleotide with phosphorothioate linkage
  modified_base 4: mod_base = OTHER; note = 2'-O-methoxyethyl modified nucleotide with phosphorothioate linkage
  modified_base 5: mod_base = OTHER; note = 2'-O-methoxyethyl modified nucleotide with phosphorothioate linkage
  modified_base 6: mod_base = OTHER; note = 2'-O-methoxyethyl modified abasic nucleotide with phosphorothioate linkage
  modified_base 7: mod_base = OTHER; note = Nucleotide with phosphorothioate linkage
  modified_base 8: mod_base = OTHER; note = Thymine with phosphorothioate linkage
  modified_base 9: mod_base = OTHER; note = Nucleotide with phosphorothioate linkage
  modified_base 10: mod_base = OTHER; note = Nucleotide with phosphorothioate linkage
  modified_base 11: mod_base = OTHER; note = Nucleotide with phosphorothioate linkage
  modified_base 12: mod_base = OTHER; note = Nucleotide with phosphorothioate linkage
  modified_base 13: mod_base = OTHER; note = 5-methylcytosine with phosphorothioate linkage
  modified_base 14: mod_base = OTHER; note = Nucleotide with phosphorothioate linkage
  modified_base 15: mod_base = OTHER; note = Nucleotide with phosphorothioate linkage
  modified_base 16: mod_base = OTHER; note = 2'-O-methoxyethyl modified nucleotide with phosphorothioate linkage
  modified_base 17: mod_base = OTHER; note = 2'-O-methoxyethyl modified nucleotide with phosphorothioate linkage
  modified_base 18: mod_base = OTHER; note = 2'-O-methoxyethyl modified thymine with phosphorothioate linkage
  modified_base 19: mod_base = OTHER; note = 2'-O-methoxyethyl modified nucleotide with phosphorothioate linkage
  modified_base 20: mod_base = OTHER; note = 2'-O-methoxyethyl 5-methylcytosine
  misc_feature 1..6: note = RNA
  misc_feature 7..15: note = DNA
  misc_feature 16..20: note = RNA
gcagangtgaagcgaagtgc

SEQ ID NO: 1271 - DNA, 20 bp, synthetic construct
  source 1..20: mol_type = other DNA
  modified_base 1: mod_base = OTHER; note = 2'-O-methoxyethyl modified nucleotide with phosphorothioate linkage
  modified_base 2: mod_base = OTHER; note = 2'-O-methoxyethyl 5-methylcytosine with phosphorothioate linkage
  modified_base 3: mod_base = OTHER; note = 2'-O-methoxyethyl modified nucleotide with phosphorothioate linkage
  modified_base 4: mod_base = OTHER; note = 2'-O-methoxyethyl modified nucleotide with phosphorothioate linkage
  modified_base 5: mod_base = OTHER; note = 2'-O-methoxyethyl modified nucleotide with phosphorothioate linkage
  modified_base 6: mod_base = OTHER; note = Nucleotide with phosphorothioate linkage
  modified_base 7: mod_base = OTHER; note = 2'-O-methoxyethyl modified abasic nucleotide with phosphorothioate linkage
  modified_base 8: mod_base = OTHER; note = Thymine with phosphorothioate linkage
  modified_base 9: mod_base = OTHER; note = Nucleotide with phosphorothioate linkage
  modified_base 10: mod_base = OTHER; note = Nucleotide with phosphorothioate linkage
  modified_base 11: mod_base = OTHER; note = Nucleotide with phosphorothioate linkage
  modified_base 12: mod_base = OTHER; note = Nucleotide with phosphorothioate linkage
  modified_base 13: mod_base = OTHER; note = 5-methylcytosine with phosphorothioate linkage
  modified_base 14: mod_base = OTHER; note = Nucleotide with phosphorothioate linkage
  modified_base 15: mod_base = OTHER; note = Nucleotide with phosphorothioate linkage
  modified_base 16: mod_base = OTHER; note = 2'-O-methoxyethyl modified nucleotide with phosphorothioate linkage
  modified_base 17: mod_base = OTHER; note = 2'-O-methoxyethyl modified nucleotide with phosphorothioate linkage
  modified_base 18: mod_base = OTHER; note = 2'-O-methoxyethyl modified thymine with phosphorothioate linkage
  modified_base 19: mod_base = OTHER; note = 2'-O-methoxyethyl modified nucleotide with phosphorothioate linkage
  modified_base 20: mod_base = OTHER; note = 2'-O-methoxyethyl 5-methylcytosine
  misc_feature 1..5: note = RNA
  misc_feature 6: note = DNA
  misc_feature 7: note = RNA
  misc_feature 8..15: note = DNA
  misc_feature 16..20: note = RNA
gcagagntgaagcgaagtgc

SEQ ID NO: 1272 - DNA, 20 bp, synthetic construct
  source 1..20: mol_type = other DNA
  modified_base 1: mod_base = OTHER; note = 2'-O-methoxyethyl modified nucleotide with phosphorothioate linkage
  modified_base 2: mod_base = OTHER; note = 2'-O-methoxyethyl 5-methylcytosine with phosphorothioate linkage
  modified_base 3: mod_base = OTHER; note = 2'-O-methoxyethyl modified nucleotide with phosphorothioate linkage
  modified_base 4: mod_base = OTHER; note = 2'-O-methoxyethyl modified nucleotide with phosphorothioate linkage
  modified_base 5: mod_base = OTHER; note = 2'-O-methoxyethyl modified nucleotide with phosphorothioate linkage
  modified_base 6: mod_base = OTHER; note = Nucleotide with phosphorothioate linkage
  modified_base 7: mod_base = OTHER; note = Nucleotide with phosphorothioate linkage
  modified_base 8: mod_base = OTHER; note = 2'-O-methoxyethyl modified abasic nucleotide with phosphorothioate linkage
  modified_base 9: mod_base = OTHER; note = Nucleotide with phosphorothioate linkage
  modified_base 10: mod_base = OTHER; note = Nucleotide with phosphorothioate linkage
  modified_base 11: mod_base = OTHER; note = Nucleotide with phosphorothioate linkage
  modified_base 12: mod_base = OTHER; note = Nucleotide with phosphorothioate linkage
  modified_base 13: mod_base = OTHER; note = 5-methylcytosine with phosphorothioate linkage
  modified_base 14: mod_base = OTHER; note = Nucleotide with phosphorothioate linkage
  modified_base 15: mod_base = OTHER; note = Nucleotide with phosphorothioate linkage
  modified_base 16: mod_base = OTHER; note = 2'-O-methoxyethyl modified nucleotide with phosphorothioate linkage
  modified_base 17: mod_base = OTHER; note = 2'-O-methoxyethyl modified nucleotide with phosphorothioate linkage
  modified_base 18: mod_base = OTHER; note = 2'-O-methoxyethyl modified thymine with phosphorothioate linkage
  modified_base 19: mod_base = OTHER; note = 2'-O-methoxyethyl modified nucleotide with phosphorothioate linkage
  modified_base 20: mod_base = OTHER; note = 2'-O-methoxyethyl 5-methylcytosine
  misc_feature 1..5: note = RNA
  misc_feature 6..7: note = DNA
  misc_feature 8: note = RNA
  misc_feature 9..15: note = DNA
  misc_feature 16..20: note = RNA
gcagaggngaagcgaagtgc

SEQ ID NO: 1273 - DNA, 20 bp, synthetic construct
  source 1..20: mol_type = other DNA
  modified_base 1: mod_base = OTHER; note = 2'-O-methoxyethyl modified nucleotide with phosphorothioate linkage
  modified_base 2: mod_base = OTHER; note = 2'-O-methoxyethyl 5-methylcytosine with phosphorothioate linkage
  modified_base 3: mod_base = OTHER; note = 2'-O-methoxyethyl modified nucleotide with phosphorothioate linkage
  modified_base 4: mod_base = OTHER; note = 2'-O-methoxyethyl modified nucleotide with phosphorothioate linkage
  modified_base 5: mod_base = OTHER; note = 2'-O-methoxyethyl modified nucleotide with phosphorothioate linkage
  modified_base 6: mod_base = OTHER; note = Nucleotide with phosphorothioate linkage
  modified_base 7: mod_base = OTHER; note = Nucleotide with phosphorothioate linkage
  modified_base 8: mod_base = OTHER; note = Thymine with phosphorothioate linkage
  modified_base 9: mod_base = OTHER; note = 2'-O-methoxyethyl modified abasic nucleotide with phosphorothioate linkage
  modified_base 10: mod_base = OTHER; note = Nucleotide with phosphorothioate linkage
  modified_base 11: mod_base = OTHER; note = Nucleotide with phosphorothioate linkage
  modified_base 12: mod_base = OTHER; note = Nucleotide with phosphorothioate linkage
  modified_base 13: mod_base = OTHER; note = 5-methylcytosine with phosphorothioate linkage
  modified_base 14: mod_base = OTHER; note = Nucleotide with phosphorothioate linkage
  modified_base 15: mod_base = OTHER; note = Nucleotide with phosphorothioate linkage
  modified_base 16: mod_base = OTHER; note = 2'-O-methoxyethyl modified nucleotide with phosphorothioate linkage
  modified_base 17: mod_base = OTHER; note = 2'-O-methoxyethyl modified nucleotide with phosphorothioate linkage
  modified_base 18: mod_base = OTHER; note = 2'-O-methoxyethyl modified thymine with phosphorothioate linkage
  modified_base 19: mod_base = OTHER; note = 2'-O-methoxyethyl modified nucleotide with phosphorothioate linkage
  modified_base 20: mod_base = OTHER; note = 2'-O-methoxyethyl 5-methylcytosine
  misc_feature 1..5: note = RNA
  misc_feature 6..8: note = DNA
  misc_feature 9: note = RNA
  misc_feature 10..15: note = DNA
  misc_feature 16..20: note = RNA
gcagaggtnaagcgaagtgc

SEQ ID NO: 1274 - DNA, 20 bp, synthetic construct
  source 1..20: mol_type = other DNA
  modified_base 1: mod_base = OTHER; note = 2'-O-methoxyethyl modified nucleotide with phosphorothioate linkage
  modified_base 2: mod_base = OTHER; note = 2'-O-methoxyethyl 5-methylcytosine with phosphorothioate linkage
  modified_base 3: mod_base = OTHER; note = 2'-O-methoxyethyl modified nucleotide with phosphorothioate linkage
  modified_base 4: mod_base = OTHER; note = 2'-O-methoxyethyl modified nucleotide with phosphorothioate linkage
  modified_base 5: mod_base = OTHER; note = 2'-O-methoxyethyl modified nucleotide with phosphorothioate linkage
  modified_base 6: mod_base = OTHER; note = Nucleotide with phosphorothioate linkage
  modified_base 7: mod_base = OTHER; note = Nucleotide with phosphorothioate linkage
  modified_base 8: mod_base = OTHER; note = Thymine with phosphorothioate linkage
  modified_base 9: mod_base = OTHER; note = Nucleotide with phosphorothioate linkage
  modified_base 10: mod_base = OTHER; note = 2'-O-methoxyethyl modified abasic nucleotide with phosphorothioate linkage
  modified_base 11: mod_base = OTHER; note = Nucleotide with phosphorothioate linkage
  modified_base 12: mod_base = OTHER; note = Nucleotide with phosphorothioate linkage
  modified_base 13: mod_base = OTHER; note = 5-methylcytosine with phosphorothioate linkage
  modified_base 14: mod_base = OTHER; note = Nucleotide with phosphorothioate linkage
  modified_base 15: mod_base = OTHER; note = Nucleotide with phosphorothioate linkage
  modified_base 16: mod_base = OTHER; note = 2'-O-methoxyethyl modified nucleotide with phosphorothioate linkage
  modified_base 17: mod_base = OTHER; note = 2'-O-methoxyethyl modified nucleotide with phosphorothioate linkage
  modified_base 18: mod_base = OTHER; note = 2'-O-methoxyethyl modified thymine with phosphorothioate linkage
  modified_base 19: mod_base = OTHER; note = 2'-O-methoxyethyl modified nucleotide with phosphorothioate linkage
  modified_base 20: mod_base = OTHER; note = 2'-O-methoxyethyl 5-methylcytosine
  misc_feature 1..5: note = RNA
  misc_feature 6..9: note = DNA
  misc_feature 10: note = RNA
  misc_feature 11..15: note = DNA
  misc_feature 16..20: note = RNA
gcagaggtgnagcgaagtgc

SEQ ID NO: 1275 - DNA, 20 bp, synthetic construct
  source 1..20: mol_type = other DNA
  modified_base 1: mod_base = OTHER; note = 2'-O-methoxyethyl modified nucleotide with phosphorothioate linkage
  modified_base 2: mod_base = OTHER; note = 2'-O-methoxyethyl 5-methylcytosine with phosphorothioate linkage
  modified_base 3: mod_base = OTHER; note = 2'-O-methoxyethyl modified nucleotide with phosphorothioate linkage
  modified_base 4: mod_base = OTHER; note = 2'-O-methoxyethyl modified nucleotide with phosphorothioate linkage
  modified_base 5: mod_base = OTHER; note = 2'-O-methoxyethyl modified nucleotide with phosphorothioate linkage
  modified_base 6: mod_base = OTHER; note = Nucleotide with phosphorothioate linkage
  modified_base 7: mod_base = OTHER; note = Nucleotide with phosphorothioate linkage
  modified_base 8: mod_base = OTHER; note = Thymine with phosphorothioate linkage
  modified_base 9: mod_base = OTHER; note = Nucleotide with phosphorothioate linkage
  modified_base 10: mod_base = OTHER; note = Nucleotide with phosphorothioate linkage
  modified_base 11: mod_base = OTHER; note = 2'-O-methoxyethyl modified abasic nucleotide with phosphorothioate linkage
  modified_base 12: mod_base = OTHER; note = Nucleotide with phosphorothioate linkage
  modified_base 13: mod_base = OTHER; note = 5-methylcytosine with phosphorothioate linkage
  modified_base 14: mod_base = OTHER; note = Nucleotide with phosphorothioate linkage
  modified_base 15: mod_base = OTHER; note = Nucleotide with phosphorothioate linkage
  modified_base 16: mod_base = OTHER; note = 2'-O-methoxyethyl modified nucleotide with phosphorothioate linkage
  modified_base 17: mod_base = OTHER; note = 2'-O-methoxyethyl modified nucleotide with phosphorothioate linkage
  modified_base 18: mod_base = OTHER; note = 2'-O-methoxyethyl modified thymine with phosphorothioate linkage
  modified_base 19: mod_base = OTHER; note = 2'-O-methoxyethyl modified nucleotide with phosphorothioate linkage
  modified_base 20: mod_base = OTHER; note = 2'-O-methoxyethyl 5-methylcytosine
  misc_feature 1..5: note = RNA
  misc_feature 6..10: note = DNA
  misc_feature 11: note = RNA
  misc_feature 12..15: note = DNA
  misc_feature 16..20: note = RNA
gcagaggtgangcgaagtgc

SEQ ID NO: 1276 - DNA, 20 bp, synthetic construct
  source 1..20: mol_type = other DNA
  modified_base 1: mod_base = OTHER; note = 2'-O-methoxyethyl modified nucleotide with phosphorothioate linkage
  modified_base 2: mod_base = OTHER; note = 2'-O-methoxyethyl 5-methylcytosine with phosphorothioate linkage
  modified_base 3: mod_base = OTHER; note = 2'-O-methoxyethyl modified nucleotide with phosphorothioate linkage
  modified_base 4: mod_base = OTHER; note = 2'-O-methoxyethyl modified nucleotide with phosphorothioate linkage
  modified_base 5: mod_base = OTHER; note = 2'-O-methoxyethyl modified nucleotide with phosphorothioate linkage
  modified_base 6: mod_base = OTHER; note = Nucleotide with phosphorothioate linkage
  modified_base 7: mod_base = OTHER; note = Nucleotide with phosphorothioate linkage
  modified_base 8: mod_base = OTHER; note = Thymine with phosphorothioate linkage
  modified_base 9: mod_base = OTHER; note = Nucleotide with phosphorothioate linkage
  modified_base 10: mod_base = OTHER; note = Nucleotide with phosphorothioate linkage
  modified_base 11: mod_base = OTHER; note = Nucleotide with phosphorothioate linkage
  modified_base 12: mod_base = OTHER; note = 2'-O-methoxyethyl modified abasic nucleotide with phosphorothioate linkage
  modified_base 13: mod_base = OTHER; note = 5-methylcytosine with phosphorothioate linkage
  modified_base 14: mod_base = OTHER; note = Nucleotide with phosphorothioate linkage
  modified_base 15: mod_base = OTHER; note = Nucleotide with phosphorothioate linkage
  modified_base 16: mod_base = OTHER; note = 2'-O-methoxyethyl modified nucleotide with phosphorothioate linkage
  modified_base 17: mod_base = OTHER; note = 2'-O-methoxyethyl modified nucleotide with phosphorothioate linkage
  modified_base 18: mod_base = OTHER; note = 2'-O-methoxyethyl modified thymine with phosphorothioate linkage
  modified_base 19: mod_base = OTHER; note = 2'-O-methoxyethyl modified nucleotide with phosphorothioate linkage
  modified_base 20: mod_base = OTHER; note = 2'-O-methoxyethyl 5-methylcytosine
  misc_feature 1..5: note = RNA
  misc_feature 6..11: note = DNA
  misc_feature 12: note = RNA
  misc_feature 13..15: note = DNA
  misc_feature 16..20: note = RNA
gcagaggtgaancgaagtgc

SEQ ID NO: 1277 - DNA, 20 bp, synthetic construct
  source 1..20: mol_type = other DNA
  modified_base 1: mod_base = OTHER; note = 2'-O-methoxyethyl modified nucleotide with phosphorothioate linkage
  modified_base 2: mod_base = OTHER; note = 2'-O-methoxyethyl 5-methylcytosine with phosphorothioate linkage
  modified_base 3: mod_base = OTHER; note = 2'-O-methoxyethyl modified nucleotide with phosphorothioate linkage
  modified_base 4: mod_base = OTHER; note = 2'-O-methoxyethyl modified nucleotide with phosphorothioate linkage
  modified_base 5: mod_base = OTHER; note = 2'-O-methoxyethyl modified nucleotide with phosphorothioate linkage
  modified_base 6: mod_base = OTHER; note = Nucleotide with phosphorothioate linkage
  modified_base 7: mod_base = OTHER; note = Nucleotide with phosphorothioate linkage
  modified_base 8: mod_base = OTHER; note = Thymine with phosphorothioate linkage
  modified_base 9: mod_base = OTHER; note = Nucleotide with phosphorothioate linkage
  modified_base 10: mod_base = OTHER; note = Nucleotide with phosphorothioate linkage
  modified_base 11: mod_base = OTHER; note = Nucleotide with phosphorothioate linkage
  modified_base 12: mod_base = OTHER; note = Nucleotide with phosphorothioate linkage
  modified_base 13: mod_base = OTHER; note = 2'-O-methoxyethyl modified abasic nucleotide with phosphorothioate linkage
  modified_base 14: mod_base = OTHER; note = Nucleotide with phosphorothioate linkage
  modified_base 15: mod_base = OTHER; note = Nucleotide with phosphorothioate linkage
  modified_base 16: mod_base = OTHER; note = 2'-O-methoxyethyl modified nucleotide with phosphorothioate linkage
  modified_base 17: mod_base = OTHER; note = 2'-O-methoxyethyl modified nucleotide with phosphorothioate linkage
  modified_base 18: mod_base = OTHER; note = 2'-O-methoxyethyl modified thymine with phosphorothioate linkage
  modified_base 19: mod_base = OTHER; note = 2'-O-methoxyethyl modified nucleotide with phosphorothioate linkage
  modified_base 20: mod_base = OTHER; note = 2'-O-methoxyethyl 5-methylcytosine
  misc_feature 1..5: note = RNA
  misc_feature 6..12: note = DNA
  misc_feature 13: note = RNA
  misc_feature 14..15: note = DNA
  misc_feature 16..20: note = RNA
gcagaggtgaagngaagtgc

SEQ ID NO: 1278 - DNA, 20 bp, synthetic construct
  source 1..20: mol_type = other DNA
  modified_base 1: mod_base = OTHER; note = 2'-O-methoxyethyl modified nucleotide with phosphorothioate linkage
  modified_base 2: mod_base = OTHER; note = 2'-O-methoxyethyl 5-methylcytosine with phosphorothioate linkage
  modified_base 3: mod_base = OTHER; note = 2'-O-methoxyethyl modified nucleotide with phosphorothioate linkage
  modified_base 4: mod_base = OTHER; note = 2'-O-methoxyethyl modified nucleotide with phosphorothioate linkage
  modified_base 5: mod_base = OTHER; note = 2'-O-methoxyethyl modified nucleotide with phosphorothioate linkage
  modified_base 6: mod_base = OTHER; note = Nucleotide with phosphorothioate linkage
  modified_base 7: mod_base = OTHER; note = Nucleotide with phosphorothioate linkage
  modified_base 8: mod_base = OTHER; note = Thymine with phosphorothioate linkage
  modified_base 9: mod_base = OTHER; note = Nucleotide with phosphorothioate linkage
  modified_base 10: mod_base = OTHER; note = Nucleotide with phosphorothioate linkage
  modified_base 11: mod_base = OTHER; note = Nucleotide with phosphorothioate linkage
  modified_base 12: mod_base = OTHER; note = Nucleotide with phosphorothioate linkage
  modified_base 13: mod_base = OTHER; note = 5-methylcytosine with phosphorothioate linkage
  modified_base 14: mod_base = OTHER; note = 2'-O-methoxyethyl modified abasic nucleotide with phosphorothioate linkage
  modified_base 15: mod_base = OTHER; note = Nucleotide with phosphorothioate linkage
  modified_base 16: mod_base = OTHER; note = 2'-O-methoxyethyl modified nucleotide with phosphorothioate linkage
  modified_base 17: mod_base = OTHER; note = 2'-O-methoxyethyl modified nucleotide with phosphorothioate linkage
  modified_base 18: mod_base = OTHER; note = 2'-O-methoxyethyl modified thymine with phosphorothioate linkage
  modified_base 19: mod_base = OTHER; note = 2'-O-methoxyethyl modified nucleotide with phosphorothioate linkage
  modified_base 20: mod_base = OTHER; note = 2'-O-methoxyethyl 5-methylcytosine
  misc_feature 1..5: note = RNA
  misc_feature 6..13: note = DNA
  misc_feature 14: note = RNA
  misc_feature 15: note = DNA
  misc_feature 16..20: note = RNA
gcagaggtgaagcnaagtgc

SEQ ID NO: 1279 - DNA, 20 bp, synthetic construct
  source 1..20: mol_type = other DNA
  modified_base 1: mod_base = OTHER; note = 2'-O-methoxyethyl modified nucleotide with phosphorothioate linkage
  modified_base 2: mod_base = OTHER; note = 2'-O-methoxyethyl 5-methylcytosine with phosphorothioate linkage
  modified_base 3: mod_base = OTHER; note = 2'-O-methoxyethyl modified nucleotide with phosphorothioate linkage
  modified_base 4: mod_base = OTHER; note = 2'-O-methoxyethyl modified nucleotide with phosphorothioate linkage
  modified_base 5: mod_base = OTHER; note = 2'-O-methoxyethyl modified nucleotide with phosphorothioate linkage
  modified_base 6: mod_base = OTHER; note = Nucleotide with phosphorothioate linkage
  modified_base 7: mod_base = OTHER; note = Nucleotide with phosphorothioate linkage
  modified_base 8: mod_base = OTHER; note = Thymine with phosphorothioate linkage
  modified_base 9: mod_base = OTHER; note = Nucleotide with phosphorothioate linkage
  modified_base 10: mod_base = OTHER; note = Nucleotide with phosphorothioate linkage
  modified_base 11: mod_base = OTHER; note = Nucleotide with phosphorothioate linkage
  modified_base 12: mod_base = OTHER; note = Nucleotide with phosphorothioate linkage
  modified_base 13: mod_base = OTHER; note = 5-methylcytosine with phosphorothioate linkage
  modified_base 14: mod_base = OTHER; note = Nucleotide with phosphorothioate linkage
  modified_base 15: mod_base = OTHER; note = 2'-O-methoxyethyl modified abasic nucleotide with phosphorothioate linkage
  modified_base 16: mod_base = OTHER; note = 2'-O-methoxyethyl modified nucleotide with phosphorothioate linkage
  modified_base 17: mod_base = OTHER; note = 2'-O-methoxyethyl modified nucleotide with phosphorothioate linkage
  modified_base 18: mod_base = OTHER; note = 2'-O-methoxyethyl modified thymine with phosphorothioate linkage
  modified_base 19: mod_base = OTHER; note = 2'-O-methoxyethyl modified nucleotide with phosphorothioate linkage
  modified_base 20: mod_base = OTHER; note = 2'-O-methoxyethyl 5-methylcytosine
  misc_feature 1..5: note = RNA
  misc_feature 6..14: note = DNA
  misc_feature 15..20: note = RNA
gcagaggtgaagcgnagtgc

SEQ ID NO: 1280 - DNA, 20 bp, synthetic construct
  source 1..20: mol_type = other DNA
  modified_base 1: mod_base = OTHER; note = 2'-O-methoxyethyl modified nucleotide with phosphorothioate linkage
  modified_base 2: mod_base = OTHER; note = 2'-O-methoxyethyl 5-methylcytosine with phosphorothioate linkage
  modified_base 3: mod_base = OTHER; note = 2'-O-methoxyethyl modified nucleotide with phosphorothioate linkage
  modified_base 4: mod_base = OTHER; note = 2'-O-methoxyethyl modified nucleotide with phosphorothioate linkage
  modified_base 5: mod_base = OTHER; note = 2'-O-methoxyethyl modified nucleotide with phosphorothioate linkage
  modified_base 6: mod_base = OTHER; note = Nucleotide with phosphorothioate linkage
  modified_base 7: mod_base = OTHER; note = Nucleotide with phosphorothioate linkage
  modified_base 8: mod_base = OTHER; note = Thymine with phosphorothioate linkage
  modified_base 9: mod_base = OTHER; note = Nucleotide with phosphorothioate linkage
  modified_base 10: mod_base = OTHER; note = Nucleotide with phosphorothioate linkage
  modified_base 11: mod_base = OTHER; note = Nucleotide with phosphorothioate linkage
  modified_base 12: mod_base = OTHER; note = Nucleotide with phosphorothioate linkage
  modified_base 13: mod_base = OTHER; note = Locked abasic nucleotide with phosphorothioate linkage
  modified_base 14: mod_base = OTHER; note = Nucleotide with phosphorothioate linkage
  modified_base 15: mod_base = OTHER; note = Nucleotide with phosphorothioate linkage
  modified_base 16: mod_base = OTHER; note = 2'-O-methoxyethyl modified nucleotide with phosphorothioate linkage
  modified_base 17: mod_base = OTHER; note = 2'-O-methoxyethyl modified nucleotide with phosphorothioate linkage
  modified_base 18: mod_base = OTHER; note = 2'-O-methoxyethyl modified thymine with phosphorothioate linkage
  modified_base 19: mod_base = OTHER; note = 2'-O-methoxyethyl modified nucleotide with phosphorothioate linkage
  modified_base 20: mod_base = OTHER; note = 2'-O-methoxyethyl 5-methylcytosine
  misc_feature 1..5: note = RNA
  misc_feature 6..12: note = DNA
  misc_feature 13: note = RNA
  misc_feature 14..15: note = DNA
  misc_feature 16..20: note = RNA
gcagaggtgaagngaagtgc

SEQ ID NO: 1281 - DNA, 20 bp, synthetic construct
  source 1..20: mol_type = other DNA
  modified_base 1: mod_base = OTHER; note = 2'-O-methoxyethyl modified nucleotide with phosphorothioate linkage
  modified_base 2: mod_base = OTHER; note = 2'-O-methoxyethyl 5-methylcytosine with phosphorothioate linkage
  modified_base 3: mod_base = OTHER; note = 2'-O-methoxyethyl modified nucleotide with phosphorothioate linkage
  modified_base 4: mod_base = OTHER; note = 2'-O-methoxyethyl modified nucleotide with phosphorothioate linkage
  modified_base 5: mod_base = OTHER; note = 2'-O-methoxyethyl modified nucleotide with phosphorothioate linkage
  modified_base 6: mod_base = OTHER; note = Nucleotide with phosphorothioate linkage
  modified_base 7: mod_base = OTHER; note = Nucleotide with phosphorothioate linkage
  modified_base 8: mod_base = OTHER; note = Thymine with phosphorothioate linkage
  modified_base 9: mod_base = OTHER; note = Nucleotide with phosphorothioate linkage
  modified_base 10: mod_base = OTHER; note = Nucleotide with phosphorothioate linkage
  modified_base 11: mod_base = OTHER; note = Nucleotide with phosphorothioate linkage
  modified_base 12: mod_base = OTHER; note = Locked abasic nucleotide with phosphorothioate linkage
  modified_base 13: mod_base = OTHER; note = 5-methylcytosine with phosphorothioate linkage
  modified_base 14: mod_base = OTHER; note = Nucleotide with phosphorothioate linkage
  modified_base 15: mod_base = OTHER; note = Nucleotide with phosphorothioate linkage
  modified_base 16: mod_base = OTHER; note = 2'-O-methoxyethyl modified nucleotide with phosphorothioate linkage
  modified_base 17: mod_base = OTHER; note = 2'-O-methoxyethyl modified nucleotide with phosphorothioate linkage
  modified_base 18: mod_base = OTHER; note = 2'-O-methoxyethyl modified thymine with phosphorothioate linkage
  modified_base 19: mod_base = OTHER; note = 2'-O-methoxyethyl modified nucleotide with phosphorothioate linkage
  modified_base 20: mod_base = OTHER; note = 2'-O-methoxyethyl 5-methylcytosine
  misc_feature 1..5: note = RNA
  misc_feature 6..11: note = DNA
  misc_feature 12: note = RNA
  misc_feature 13..15: note = DNA
  misc_feature 16..20: note = RNA
gcagaggtgaancgaagtgc

SEQ ID NO: 1282 - DNA, 20 bp, synthetic construct
  source 1..20: mol_type = other DNA
  modified_base 1: mod_base = OTHER; note = 2'-O-methoxyethyl modified nucleotide with phosphorothioate linkage
  modified_base 2: mod_base = OTHER; note = 2'-O-methoxyethyl 5-methylcytosine with phosphorothioate linkage
  modified_base 3: mod_base = OTHER; note = 2'-O-methoxyethyl modified nucleotide with phosphorothioate linkage
  modified_base 4: mod_base = OTHER; note = 2'-O-methoxyethyl modified nucleotide with phosphorothioate linkage
  modified_base 5: mod_base = OTHER; note = 2'-O-methoxyethyl modified nucleotide with phosphorothioate linkage
  modified_base 6: mod_base = OTHER; note = Nucleotide with phosphorothioate linkage
  modified_base 7: mod_base = OTHER; note = Nucleotide with phosphorothioate linkage
  modified_base 8: mod_base = OTHER; note = Thymine with phosphorothioate linkage
  modified_base 9: mod_base = OTHER; note = Nucleotide with phosphorothioate linkage
  modified_base 10: mod_base = OTHER; note = Nucleotide with phosphorothioate linkage
  modified_base 11: mod_base = OTHER; note = Locked abasic nucleotide with phosphorothioate linkage
  modified_base 12: mod_base = OTHER; note = Nucleotide with phosphorothioate linkage
  modified_base 13: mod_base = OTHER; note = 5-methylcytosine with phosphorothioate linkage
  modified_base 14: mod_base = OTHER; note = Nucleotide with phosphorothioate linkage
  modified_base 15: mod_base = OTHER; note = Nucleotide with phosphorothioate linkage
  modified_base 16: mod_base = OTHER; note = 2'-O-methoxyethyl modified nucleotide with phosphorothioate linkage
  modified_base 17: mod_base = OTHER; note = 2'-O-methoxyethyl modified nucleotide with phosphorothioate linkage
  modified_base 18: mod_base = OTHER; note = 2'-O-methoxyethyl modified thymine with phosphorothioate linkage
  modified_base 19: mod_base = OTHER; note = 2'-O-methoxyethyl modified nucleotide with phosphorothioate linkage
  modified_base 20: mod_base = OTHER; note = 2'-O-methoxyethyl 5-methylcytosine
  misc_feature 1..5: note = RNA
  misc_feature 6..10: note = DNA
  misc_feature 11: note = RNA
  misc_feature 12..15: note = DNA
  misc_feature 16..20: note = RNA
gcagaggtgangcgaagtgc

SEQ ID NO: 1283 - DNA, 20 bp, synthetic construct
  source 1..20: mol_type = other DNA
  modified_base 1: mod_base = OTHER; note = 2'-O-methoxyethyl modified nucleotide with phosphorothioate linkage
  modified_base 2: mod_base = OTHER; note = 2'-O-methoxyethyl 5-methylcytosine with phosphorothioate linkage
  modified_base 3: mod_base = OTHER; note = 2'-O-methoxyethyl modified nucleotide with phosphorothioate linkage
  modified_base 4: mod_base = OTHER; note = 2'-O-methoxyethyl modified nucleotide with phosphorothioate linkage
  modified_base 5: mod_base = OTHER; note = 2'-O-methoxyethyl modified nucleotide with phosphorothioate linkage
  modified_base 6: mod_base = OTHER; note = Nucleotide with phosphorothioate linkage
  modified_base 7: mod_base = OTHER; note = Nucleotide with phosphorothioate linkage
  modified_base 8: mod_base = OTHER; note = Thymine with phosphorothioate linkage
  modified_base 9: mod_base = OTHER; note = Nucleotide with phosphorothioate linkage
  modified_base 10: mod_base = OTHER; note = Locked abasic nucleotide with phosphorothioate linkage
  modified_base 11: mod_base = OTHER; note = Nucleotide with phosphorothioate linkage
  modified_base 12: mod_base = OTHER; note = Nucleotide with phosphorothioate linkage
  modified_base 13: mod_base = OTHER; note = 5-methylcytosine with phosphorothioate linkage
  modified_base 14: mod_base = OTHER; note = Nucleotide with phosphorothioate linkage
  modified_base 15: mod_base = OTHER; note = Nucleotide with phosphorothioate linkage
  modified_base 16: mod_base = OTHER; note = 2'-O-methoxyethyl modified nucleotide with phosphorothioate linkage
  modified_base 17: mod_base = OTHER; note = 2'-O-methoxyethyl modified nucleotide with phosphorothioate linkage
  modified_base 18: mod_base = OTHER; note = 2'-O-methoxyethyl modified thymine with phosphorothioate linkage
  modified_base 19: mod_base = OTHER; note = 2'-O-methoxyethyl modified nucleotide with phosphorothioate linkage
  modified_base 20: mod_base = OTHER; note = 2'-O-methoxyethyl 5-methylcytosine
  misc_feature 1..5: note = RNA
  misc_feature 6..9: note = DNA
  misc_feature 10: note = RNA
  misc_feature 11..15: note = DNA
  misc_feature 16..20: note = RNA
gcagaggtgnagcgaagtgc

SEQ ID NO: 1284 - DNA, 20 bp, synthetic construct
  source 1..20: mol_type = other DNA
  modified_base 1: mod_base = OTHER; note = 2'-O-methoxyethyl modified nucleotide with phosphorothioate linkage
  modified_base 2: mod_base = OTHER; note = 2'-O-methoxyethyl 5-methylcytosine with phosphorothioate linkage
  modified_base 3: mod_base = OTHER; note = 2'-O-methoxyethyl modified nucleotide with phosphorothioate linkage
  modified_base 4: mod_base = OTHER; note = 2'-O-methoxyethyl modified nucleotide with phosphorothioate linkage
  modified_base 5: mod_base = OTHER; note = 2'-O-methoxyethyl modified nucleotide with phosphorothioate linkage
  modified_base 6: mod_base = OTHER; note = Nucleotide with phosphorothioate linkage
  modified_base 7: mod_base = OTHER; note = Nucleotide with phosphorothioate linkage
  modified_base 8: mod_base = OTHER; note = Thymine with phosphorothioate linkage
  modified_base 9: mod_base = OTHER; note = Locked abasic nucleotide with phosphorothioate linkage
  modified_base 10: mod_base = OTHER; note = Nucleotide with phosphorothioate linkage
  modified_base 11: mod_base = OTHER; note = Nucleotide with phosphorothioate linkage
  modified_base 12: mod_base = OTHER; note = Nucleotide with phosphorothioate linkage
  modified_base 13: mod_base = OTHER; note = 5-methylcytosine with phosphorothioate linkage
  modified_base 14: mod_base = OTHER; note = Nucleotide with phosphorothioate linkage
  modified_base 15: mod_base = OTHER; note = Nucleotide with phosphorothioate linkage
  modified_base 16: mod_base = OTHER; note = 2'-O-methoxyethyl modified nucleotide with phosphorothioate linkage
  modified_base 17: mod_base = OTHER; note = 2'-O-methoxyethyl modified nucleotide with phosphorothioate linkage
  modified_base 18: mod_base = OTHER; note = 2'-O-methoxyethyl modified thymine with phosphorothioate linkage
  modified_base 19: mod_base = OTHER; note = 2'-O-methoxyethyl modified nucleotide with phosphorothioate linkage
  modified_base 20: mod_base = OTHER; note = 2'-O-methoxyethyl 5-methylcytosine
  misc_feature 1..5: note = RNA
  misc_feature 6..8: note = DNA
  misc_feature 9: note = RNA
  misc_feature 10..15: note = DNA
  misc_feature 16..20: note = RNA
gcagaggtnaagcgaagtgc

SEQ ID NO: 1285 - DNA, 20 bp, synthetic construct
  source 1..20: mol_type = other DNA
  modified_base 1: mod_base = OTHER; note = 2'-O-methoxyethyl modified nucleotide with phosphorothioate linkage
  modified_base 2: mod_base = OTHER; note = 2'-O-methoxyethyl 5-methylcytosine with phosphorothioate linkage
  modified_base 3: mod_base = OTHER; note = 2'-O-methoxyethyl modified nucleotide with phosphorothioate linkage
  modified_base 4: mod_base = OTHER; note = 2'-O-methoxyethyl modified nucleotide with phosphorothioate linkage
  modified_base 5: mod_base = OTHER; note = 2'-O-methoxyethyl modified nucleotide with phosphorothioate linkage
  modified_base 6: mod_base = OTHER; note = Nucleotide with phosphorothioate linkage
  modified_base 7: mod_base = OTHER; note = Nucleotide with phosphorothioate linkage
  modified_base 8: mod_base = OTHER; note = Locked abasic nucleotide with phosphorothioate linkage
  modified_base 9: mod_base = OTHER; note = Nucleotide with phosphorothioate linkage
  modified_base 10: mod_base = OTHER; note = Nucleotide with phosphorothioate linkage
  modified_base 11: mod_base = OTHER; note = Nucleotide with phosphorothioate linkage
  modified_base 12: mod_base = OTHER; note = Nucleotide with phosphorothioate linkage
  modified_base 13: mod_base = OTHER; note = 5-methylcytosine with phosphorothioate linkage
  modified_base 14: mod_base = OTHER; note = Nucleotide with phosphorothioate linkage
  modified_base 15: mod_base = OTHER; note = Nucleotide with phosphorothioate linkage
  modified_base 16: mod_base = OTHER; note = 2'-O-methoxyethyl modified nucleotide with phosphorothioate linkage
  modified_base 17: mod_base = OTHER; note = 2'-O-methoxyethyl modified nucleotide with phosphorothioate linkage
  modified_base 18: mod_base = OTHER; note = 2'-O-methoxyethyl modified thymine with phosphorothioate linkage
  modified_base 19: mod_base = OTHER; note = 2'-O-methoxyethyl modified nucleotide with phosphorothioate linkage
  modified_base 20: mod_base = OTHER; note = 2'-O-methoxyethyl 5-methylcytosine
  misc_feature 1..5: note = RNA
  misc_feature 6..7: note = DNA
  misc_feature 8: note = RNA
  misc_feature 9..15: note = DNA
  misc_feature 16..20: note = RNA
gcagaggngaagcgaagtgc

SEQ ID NO: 1286 - DNA, 20 bp, synthetic construct
  source 1..20: mol_type = other DNA
  modified_base 1: mod_base = OTHER; note = 2'-O-methoxyethyl modified nucleotide with phosphorothioate linkage
  modified_base 2: mod_base = OTHER; note = 2'-O-methoxyethyl 5-methylcytosine with phosphorothioate linkage
  modified_base 3: mod_base = OTHER; note = 2'-O-methoxyethyl modified nucleotide with phosphorothioate linkage
  modified_base 4: mod_base = OTHER; note = 2'-O-methoxyethyl modified nucleotide with phosphorothioate linkage
  modified_base 5: mod_base = OTHER; note = 2'-O-methoxyethyl modified nucleotide with phosphorothioate linkage
  modified_base 6: mod_base = OTHER; note = Nucleotide with phosphorothioate linkage
  modified_base 7: mod_base = OTHER; note = Locked abasic nucleotide with phosphorothioate linkage
  modified_base 8: mod_base = OTHER; note = Thymine with phosphorothioate linkage
  modified_base 9: mod_base = OTHER; note = Nucleotide with phosphorothioate linkage
  modified_base 10: mod_base = OTHER; note = Nucleotide with phosphorothioate linkage
  modified_base 11: mod_base = OTHER; note = Nucleotide with phosphorothioate linkage
  modified_base 12: mod_base = OTHER; note = Nucleotide with phosphorothioate linkage
  modified_base 13: mod_base = OTHER; note = 5-methylcytosine with phosphorothioate linkage
  modified_base 14: mod_base = OTHER; note = Nucleotide with phosphorothioate linkage
  modified_base 15: mod_base = OTHER; note = Nucleotide with phosphorothioate linkage
  modified_base 16: mod_base = OTHER; note = 2'-O-methoxyethyl modified nucleotide with phosphorothioate linkage
  modified_base 17: mod_base = OTHER; note = 2'-O-methoxyethyl modified nucleotide with phosphorothioate linkage
  modified_base 18: mod_base = OTHER; note = 2'-O-methoxyethyl modified thymine with phosphorothioate linkage
  modified_base 19: mod_base = OTHER; note = 2'-O-methoxyethyl modified nucleotide with phosphorothioate linkage
  modified_base 20: mod_base = OTHER; note = 2'-O-methoxyethyl 5-methylcytosine
  misc_feature 1..5: note = RNA
  misc_feature 6: note = DNA
  misc_feature 7: note = RNA
  misc_feature 8..15: note = DNA
  misc_feature 16..20: note = RNA
gcagagntgaagcgaagtgc

SEQ ID NO: 1287 - DNA, 20 bp, synthetic construct
  source 1..20: mol_type = other DNA
  modified_base 1: mod_base = OTHER; note = 2'-O-methoxyethyl modified nucleotide with phosphorothioate linkage
  modified_base 2: mod_base = OTHER; note = 2'-O-methoxyethyl 5-methylcytosine with phosphorothioate linkage
  modified_base 3: mod_base = OTHER; note = 2'-O-methoxyethyl modified nucleotide with phosphorothioate linkage
  modified_base 4: mod_base = OTHER; note = 2'-O-methoxyethyl modified nucleotide with phosphorothioate linkage
  modified_base 5: mod_base = OTHER; note = 2'-O-methoxyethyl modified nucleotide with phosphorothioate linkage
  modified_base 6: mod_base = OTHER; note = Locked abasic nucleotide with phosphorothioate linkage
  modified_base 7: mod_base = OTHER; note = Nucleotide with phosphorothioate linkage
  modified_base 8: mod_base = OTHER; note = Thymine with phosphorothioate linkage
  modified_base 9: mod_base = OTHER; note = Nucleotide with phosphorothioate linkage
  modified_base 10: mod_base = OTHER; note = Nucleotide with phosphorothioate linkage
  modified_base 11: mod_base = OTHER; note = Nucleotide with phosphorothioate linkage
  modified_base 12: mod_base = OTHER; note = Nucleotide with phosphorothioate linkage
  modified_base 13: mod_base = OTHER; note = 5-methylcytosine with phosphorothioate linkage
  modified_base 14: mod_base = OTHER; note = Nucleotide with phosphorothioate linkage
  modified_base 15: mod_base = OTHER; note = Nucleotide with phosphorothioate linkage
  modified_base 16: mod_base = OTHER; note = 2'-O-methoxyethyl modified nucleotide with phosphorothioate linkage
  modified_base 17: mod_base = OTHER; note = 2'-O-methoxyethyl modified nucleotide with phosphorothioate linkage
  modified_base 18: mod_base = OTHER; note = 2'-O-methoxyethyl modified thymine with phosphorothioate linkage
  modified_base 19: mod_base = OTHER; note = 2'-O-methoxyethyl modified nucleotide with phosphorothioate linkage
  modified_base 20: mod_base = OTHER; note = 2'-O-methoxyethyl 5-methylcytosine
  misc_feature 1..6: note = RNA
  misc_feature 7..15: note = DNA
  misc_feature 16..20: note = RNA
gcagangtgaagcgaagtgc

SEQ ID NO: 1288 - DNA, 20 bp, synthetic construct
  source 1..20: mol_type = other DNA
  modified_base 1: mod_base = OTHER; note = 2'-O-methoxyethyl modified nucleotide with phosphorothioate linkage
  modified_base 2: mod_base = OTHER; note = 2'-O-methoxyethyl 5-methylcytosine with phosphorothioate linkage
  modified_base 3: mod_base = OTHER; note = 2'-O-methoxyethyl modified nucleotide with phosphorothioate linkage
  modified_base 4: mod_base = OTHER; note = 2'-O-methoxyethyl modified nucleotide with phosphorothioate linkage
  modified_base 5: mod_base = OTHER; note = 2'-O-methoxyethyl modified nucleotide with phosphorothioate linkage
  modified_base 6: mod_base = OTHER; note = Nucleotide with phosphorothioate linkage
  modified_base 7: mod_base = OTHER; note = Nucleotide with phosphorothioate linkage
  modified_base 8: mod_base = OTHER; note = Thymine with phosphorothioate linkage
  modified_base 9: mod_base = OTHER; note = Nucleotide with phosphorothioate linkage
  modified_base 10: mod_base = OTHER; note = Nucleotide with phosphorothioate linkage
  modified_base 11: mod_base = OTHER; note = Nucleotide with phosphorothioate linkage
  modified_base 12: mod_base = OTHER; note = Nucleotide with phosphorothioate linkage
  modified_base 13: mod_base = OTHER; note = 5-methylcytosine with phosphorothioate linkage
  modified_base 14: mod_base = OTHER; note = Nucleotide with phosphorothioate linkage
  modified_base 15: mod_base = OTHER; note = Locked abasic nucleotide with phosphorothioate linkage
  modified_base 16: mod_base = OTHER; note = 2'-O-methoxyethyl modified nucleotide with phosphorothioate linkage
  modified_base 17: mod_base = OTHER; note = 2'-O-methoxyethyl modified nucleotide with phosphorothioate linkage
  modified_base 18: mod_base = OTHER; note = 2'-O-methoxyethyl modified thymine with phosphorothioate linkage
  modified_base 19: mod_base = OTHER; note = 2'-O-methoxyethyl modified nucleotide with phosphorothioate linkage
  modified_base 20: mod_base = OTHER; note = 2'-O-methoxyethyl 5-methylcytosine
  misc_feature 1..5: note = RNA
  misc_feature 6..14: note = DNA
  misc_feature 15..20: note = RNA
gcagaggtgaagcgnagtgc

SEQ ID NO: 1289 - DNA, 20 bp, synthetic construct
  source 1..20: mol_type = other DNA
  modified_base 1: mod_base = OTHER; note = 2'-O-methoxyethyl modified nucleotide with phosphorothioate linkage
  modified_base 2: mod_base = OTHER; note = 2'-O-methoxyethyl 5-methylcytosine with phosphorothioate linkage
  modified_base 3: mod_base = OTHER; note = 2'-O-methoxyethyl modified nucleotide with phosphorothioate linkage
  modified_base 4: mod_base = OTHER; note = 2'-O-methoxyethyl modified nucleotide with phosphorothioate linkage
  modified_base 5: mod_base = OTHER; note = 2'-O-methoxyethyl modified nucleotide with phosphorothioate linkage
  modified_base 6: mod_base = OTHER; note = Nucleotide with phosphorothioate linkage
  modified_base 7: mod_base = OTHER; note = Nucleotide with phosphorothioate linkage
  modified_base 8: mod_base = OTHER; note = Thymine with phosphorothioate linkage
  modified_base 9: mod_base = OTHER; note = Nucleotide with phosphorothioate linkage
  modified_base 10: mod_base = OTHER; note = Nucleotide with phosphorothioate linkage
  modified_base 11: mod_base = OTHER; note = Nucleotide with phosphorothioate linkage
  modified_base 12: mod_base = OTHER; note = Nucleotide with phosphorothioate linkage
  modified_base 13: mod_base = OTHER; note = 5-methylcytosine with phosphorothioate linkage
  modified_base 14: mod_base = OTHER; note = Locked abasic nucleotide with phosphorothioate linkage
  modified_base 15: mod_base = OTHER; note = Nucleotide with phosphorothioate linkage
  modified_base 16: mod_base = OTHER; note = 2'-O-methoxyethyl modified nucleotide with phosphorothioate linkage
  modified_base 17: mod_base = OTHER; note = 2'-O-methoxyethyl modified nucleotide with phosphorothioate linkage
  modified_base 18: mod_base = OTHER; note = 2'-O-methoxyethyl modified thymine with phosphorothioate linkage
  modified_base 19: mod_base = OTHER; note = 2'-O-methoxyethyl modified nucleotide with phosphorothioate linkage
  modified_base 20: mod_base = OTHER; note = 2'-O-methoxyethyl 5-methylcytosine
  misc_feature 1..5: note = RNA
  misc_feature 6..13: note = DNA
  misc_feature 14: note = RNA
  misc_feature 15: note = DNA
  misc_feature 16..20: note = RNA
gcagaggtgaagcnaagtgc

SEQ ID NO: 1290 - DNA, 20 bp, synthetic construct
  source 1..20: mol_type = other DNA
  modified_base 1: mod_base = OTHER; note = 2'-O-methoxyethyl modified nucleotide with phosphorothioate linkage
  modified_base 2: mod_base = OTHER; note = 2'-O-methoxyethyl 5-methylcytosine with phosphorothioate linkage
  modified_base 3: mod_base = OTHER; note = 2'-O-methoxyethyl modified nucleotide with phosphorothioate linkage
  modified_base 4: mod_base = OTHER; note = Locked nucleic acid with phosphorothioate linkage
  modified_base 5: mod_base = OTHER; note = 2'-O-methoxyethyl modified nucleotide with phosphorothioate linkage
  modified_base 6: mod_base = OTHER; note = Nucleotide with phosphorothioate linkage
  modified_base 7: mod_base = OTHER; note = Nucleotide with phosphorothioate linkage
  modified_base 8: mod_base = OTHER; note = Thymine with phosphorothioate linkage
  modified_base 9: mod_base = OTHER; note = Nucleotide with phosphorothioate linkage
  modified_base 10: mod_base = OTHER; note = 2'-O-methyl modified abasic nucleotide with phosphorothioate linkage
  modified_base 11: mod_base = OTHER; note = Nucleotide with phosphorothioate linkage
  modified_base 12: mod_base = OTHER; note = Nucleotide with phosphorothioate linkage
  modified_base 13: mod_base = OTHER; note = 5-methylcytosine with phosphorothioate linkage
  modified_base 14: mod_base = OTHER; note = Nucleotide with phosphorothioate linkage
  modified_base 15: mod_base = OTHER; note = Nucleotide with phosphorothioate linkage
  modified_base 16: mod_base = OTHER; note = 2'-O-methoxyethyl modified nucleotide with phosphorothioate linkage
  modified_base 17: mod_base = OTHER; note = 2'-O-methoxyethyl modified nucleotide with phosphorothioate linkage
  modified_base 18: mod_base = OTHER; note = 2'-O-methoxyethyl modified thymine with phosphorothioate linkage
  modified_base 19: mod_base = OTHER; note = 2'-O-methoxyethyl modified nucleotide with phosphorothioate linkage
  modified_base 20: mod_base = OTHER; note = 2'-O-methoxyethyl 5-methylcytosine
  misc_feature 1..5: note = RNA
  misc_feature 6..9: note = DNA
  misc_feature 10: note = RNA
  misc_feature 11..15: note = DNA
  misc_feature 16..20: note = RNA
gcagaggtgnagcgaagtgc

SEQ ID NO: 1291 - DNA, 20 bp, synthetic construct
  source 1..20: mol_type = other DNA
  modified_base 1: mod_base = OTHER; note = 2'-O-methoxyethyl modified nucleotide with phosphorothioate linkage
  modified_base 2: mod_base = OTHER; note = 2'-O-methoxyethyl 5-methylcytosine with phosphorothioate linkage
  modified_base 3: mod_base = OTHER; note = Locked nucleic acid with phosphorothioate linkage
  modified_base 4: mod_base = OTHER; note = 2'-O-methoxyethyl modified nucleotide with phosphorothioate linkage
  modified_base 5: mod_base = OTHER; note = 2'-O-methoxyethyl modified nucleotide with phosphorothioate linkage
  modified_base 6: mod_base = OTHER; note = Nucleotide with phosphorothioate linkage
  modified_base 7: mod_base = OTHER; note = Nucleotide with phosphorothioate linkage
  modified_base 8: mod_base = OTHER; note = Thymine with phosphorothioate linkage
  modified_base 9: mod_base = OTHER; note = Nucleotide with phosphorothioate linkage
  modified_base 10: mod_base = OTHER; note = 2'-O-methyl modified abasic nucleotide with phosphorothioate linkage
  modified_base 11: mod_base = OTHER; note = Nucleotide with phosphorothioate linkage
  modified_base 12: mod_base = OTHER; note = Nucleotide with phosphorothioate linkage
  modified_base 13: mod_base = OTHER; note = 5-methylcytosine with phosphorothioate linkage
  modified_base 14: mod_base = OTHER; note = Nucleotide with phosphorothioate linkage
  modified_base 15: mod_base = OTHER; note = Nucleotide with phosphorothioate linkage
  modified_base 16: mod_base = OTHER; note = 2'-O-methoxyethyl modified nucleotide with phosphorothioate linkage
  modified_base 17: mod_base = OTHER; note = 2'-O-methoxyethyl modified nucleotide with phosphorothioate linkage
  modified_base 18: mod_base = OTHER; note = 2'-O-methoxyethyl modified thymine with phosphorothioate linkage
  modified_base 19: mod_base = OTHER; note = 2'-O-methoxyethyl modified nucleotide with phosphorothioate linkage
  modified_base 20: mod_base = OTHER; note = 2'-O-methoxyethyl 5-methylcytosine
  misc_feature 1..5: note = RNA
  misc_feature 6..9: note = DNA
  misc_feature 10: note = RNA
  misc_feature 11..15: note = DNA
  misc_feature 16..20: note = RNA
gcagaggtgnagcgaagtgc

SEQ ID NO: 1292 - DNA, 20 bp, synthetic construct
  source 1..20: mol_type = other DNA
  modified_base 1: mod_base = OTHER; note = 2'-O-methoxyethyl modified nucleotide with phosphorothioate linkage
  modified_base 2: mod_base = OTHER; note = Locked 5-methylcytosine with phosphorothioate linkage
  modified_base 3: mod_base = OTHER; note = 2'-O-methoxyethyl modified nucleotide with phosphorothioate linkage
  modified_base 4: mod_base = OTHER; note = 2'-O-methoxyethyl modified nucleotide with phosphorothioate linkage
  modified_base 5: mod_base = OTHER; note = 2'-O-methoxyethyl modified nucleotide with phosphorothioate linkage
  modified_base 6: mod_base = OTHER; note = Nucleotide with phosphorothioate linkage
  modified_base 7: mod_base = OTHER; note = Nucleotide with phosphorothioate linkage
  modified_base 8: mod_base = OTHER; note = Thymine with phosphorothioate linkage
  modified_base 9: mod_base = OTHER; note = Nucleotide with phosphorothioate linkage
  modified_base 10: mod_base = OTHER; note = 2'-O-methyl modified abasic nucleotide with phosphorothioate linkage
  modified_base 11: mod_base = OTHER; note = Nucleotide with phosphorothioate linkage
  modified_base 12: mod_base = OTHER; note = Nucleotide with phosphorothioate linkage
  modified_base 13: mod_base = OTHER; note = 5-methylcytosine with phosphorothioate linkage
  modified_base 14: mod_base = OTHER; note = Nucleotide with phosphorothioate linkage
  modified_base 15: mod_base = OTHER; note = Nucleotide with phosphorothioate linkage
  modified_base 16: mod_base = OTHER; note = 2'-O-methoxyethyl modified nucleotide with phosphorothioate linkage
  modified_base 17: mod_base = OTHER; note = 2'-O-methoxyethyl modified nucleotide with phosphorothioate linkage
  modified_base 18: mod_base = OTHER; note = 2'-O-methoxyethyl modified thymine with phosphorothioate linkage
  modified_base 19: mod_base = OTHER; note = 2'-O-methoxyethyl modified nucleotide with phosphorothioate linkage
  modified_base 20: mod_base = OTHER; note = 2'-O-methoxyethyl 5-methylcytosine
  misc_feature 1..5: note = RNA
  misc_feature 6..9: note = DNA
  misc_feature 10: note = RNA
  misc_feature 11..15: note = DNA
  misc_feature 16..20: note = RNA
gcagaggtgnagcgaagtgc

SEQ ID NO: 1293 - DNA, 20 bp, synthetic construct
  source 1..20: mol_type = other DNA
  modified_base 1: mod_base = OTHER; note = Locked nucleic acid with phosphorothioate linkage
  modified_base 2: mod_base = OTHER; note = 2'-O-methoxyethyl 5-methylcytosine with phosphorothioate linkage
  modified_base 3: mod_base = OTHER; note = 2'-O-methoxyethyl modified nucleotide with phosphorothioate linkage
  modified_base 4: mod_base = OTHER; note = 2'-O-methoxyethyl modified nucleotide with phosphorothioate linkage
  modified_base 5: mod_base = OTHER; note = 2'-O-methoxyethyl modified nucleotide with phosphorothioate linkage
  modified_base 6: mod_base = OTHER; note = Nucleotide with phosphorothioate linkage
  modified_base 7: mod_base = OTHER; note = Nucleotide with phosphorothioate linkage
  modified_base 8: mod_base = OTHER; note = Thymine with phosphorothioate linkage
  modified_base 9: mod_base = OTHER; note = Nucleotide with phosphorothioate linkage
  modified_base 10: mod_base = OTHER; note = 2'-O-methyl modified abasic nucleotide with phosphorothioate linkage
  modified_base 11: mod_base = OTHER; note = Nucleotide with phosphorothioate linkage
  modified_base 12: mod_base = OTHER; note = Nucleotide with phosphorothioate linkage
  modified_base 13: mod_base = OTHER; note = 5-methylcytosine with phosphorothioate linkage
  modified_base 14: mod_base = OTHER; note = Nucleotide with phosphorothioate linkage
  modified_base 15: mod_base = OTHER; note = Nucleotide with phosphorothioate linkage
  modified_base 16: mod_base = OTHER; note = 2'-O-methoxyethyl modified nucleotide with phosphorothioate linkage
  modified_base 17: mod_base = OTHER; note = 2'-O-methoxyethyl modified nucleotide with phosphorothioate linkage
  modified_base 18: mod_base = OTHER; note = 2'-O-methoxyethyl modified thymine with phosphorothioate linkage
  modified_base 19: mod_base = OTHER; note = 2'-O-methoxyethyl modified nucleotide with phosphorothioate linkage
  modified_base 20: mod_base = OTHER; note = 2'-O-methoxyethyl 5-methylcytosine
  misc_feature 1..5: note = RNA
  misc_feature 6..9: note = DNA
  misc_feature 10: note = RNA
  misc_feature 11..15: note = DNA
  misc_feature 16..20: note = RNA
gcagaggtgnagcgaagtgc

SEQ ID NO: 1294 - DNA, 20 bp, synthetic construct
  source 1..20: mol_type = other DNA
  modified_base 1: mod_base = OTHER; note = 2'-O-methoxyethyl modified nucleotide with phosphorothioate linkage
  modified_base 2: mod_base = OTHER; note = 2'-O-methoxyethyl 5-methylcytosine with phosphorothioate linkage
  modified_base 3: mod_base = OTHER; note = Locked nucleic acid with phosphorothioate linkage
  modified_base 4: mod_base = OTHER; note = 2'-O-methoxyethyl modified nucleotide with phosphorothioate linkage
  modified_base 5: mod_base = OTHER; note = 2'-O-methoxyethyl modified nucleotide with phosphorothioate linkage
  modified_base 6: mod_base = OTHER; note = Nucleotide with phosphorothioate linkage
  modified_base 7: mod_base = OTHER; note = Nucleotide with phosphorothioate linkage
  modified_base 8: mod_base = OTHER; note = Thymine with phosphorothioate linkage
  modified_base 9: mod_base = OTHER; note = Nucleotide with phosphorothioate linkage
  modified_base 10: mod_base = OTHER; note = 2'-O-methyl modified abasic nucleotide with phosphorothioate linkage
  modified_base 11: mod_base = OTHER; note = Nucleotide with phosphorothioate linkage
  modified_base 12: mod_base = OTHER; note = Nucleotide with phosphorothioate linkage
  modified_base 13: mod_base = OTHER; note = 5-methylcytosine with phosphorothioate linkage
  modified_base 14: mod_base = OTHER; note = Nucleotide with phosphorothioate linkage
  modified_base 15: mod_base = OTHER; note = Nucleotide with phosphorothioate linkage
  modified_base 16: mod_base = OTHER; note = 2'-O-methoxyethyl modified nucleotide with phosphorothioate linkage
  modified_base 17: mod_base = OTHER; note = 2'-O-methoxyethyl modified nucleotide with phosphorothioate linkage
  modified_base 18: mod_base = OTHER; note = 2'-O-methoxyethyl modified thymine with phosphorothioate linkage
  modified_base 19: mod_base = OTHER; note = 2'-O-methoxyethyl modified nucleotide with phosphorothioate linkage
  modified_base 20: mod_base = OTHER; note = Locked 5-methylcytosine
  misc_feature 1..5: note = RNA
  misc_feature 6..9: note = DNA
  misc_feature 10: note = RNA
  misc_feature 11..15: note = DNA
  misc_feature 16..20: note = RNA
gcagaggtgnagcgaagtgc

SEQ ID NO: 1295 - DNA, 20 bp, synthetic construct
  source 1..20: mol_type = other DNA
  modified_base 1: mod_base = OTHER; note = 2'-O-methoxyethyl modified nucleotide with phosphorothioate linkage
  modified_base 2: mod_base = OTHER; note = 2'-O-methoxyethyl 5-methylcytosine with phosphorothioate linkage
  modified_base 3: mod_base = OTHER; note = Locked nucleic acid with phosphorothioate linkage
  modified_base 4: mod_base = OTHER; note = 2'-O-methoxyethyl modified nucleotide with phosphorothioate linkage
  modified_base 5: mod_base = OTHER; note = 2'-O-methoxyethyl modified nucleotide with phosphorothioate linkage
  modified_base 6: mod_base = OTHER; note = Nucleotide with phosphorothioate linkage
  modified_base 7: mod_base = OTHER; note = Nucleotide with phosphorothioate linkage
  modified_base 8: mod_base = OTHER; note = Thymine with phosphorothioate linkage
  modified_base 9: mod_base = OTHER; note = Nucleotide with phosphorothioate linkage
  modified_base 10: mod_base = OTHER; note = 2'-O-methyl modified abasic nucleotide with phosphorothioate linkage
  modified_base 11: mod_base = OTHER; note = Nucleotide with phosphorothioate linkage
  modified_base 12: mod_base = OTHER; note = Nucleotide with phosphorothioate linkage
  modified_base 13: mod_base = OTHER; note = 5-methylcytosine with phosphorothioate linkage
  modified_base 14: mod_base = OTHER; note = Nucleotide with phosphorothioate linkage
  modified_base 15: mod_base = OTHER; note = Nucleotide with phosphorothioate linkage
  modified_base 16: mod_base = OTHER; note = 2'-O-methoxyethyl modified nucleotide with phosphorothioate linkage
  modified_base 17: mod_base = OTHER; note = 2'-O-methoxyethyl modified nucleotide with phosphorothioate linkage
  modified_base 18: mod_base = OTHER; note = 2'-O-methoxyethyl modified thymine with phosphorothioate linkage
  modified_base 19: mod_base = OTHER; note = Locked nucleic acid with phosphorothioate linkage
  modified_base 20: mod_base = OTHER; note = 2'-O-methoxyethyl 5-methylcytosine
  misc_feature 1..5: note = RNA
  misc_feature 6..9: note = DNA
  misc_feature 10: note = RNA
  misc_feature 11..15: note = DNA
  misc_feature 16..20: note = RNA
gcagaggtgnagcgaagtgc

SEQ ID NO: 1296 - DNA, 20 bp, synthetic construct
  source 1..20: mol_type = other DNA
  modified_base 1: mod_base = OTHER; note = 2'-O-methoxyethyl modified nucleotide with phosphorothioate linkage
  modified_base 2: mod_base = OTHER; note = 2'-O-methoxyethyl 5-methylcytosine with phosphorothioate linkage
  modified_base 3: mod_base = OTHER; note = Locked nucleic acid with phosphorothioate linkage
  modified_base 4: mod_base = OTHER; note = 2'-O-methoxyethyl modified nucleotide with phosphorothioate linkage
  modified_base 5: mod_base = OTHER; note = 2'-O-methoxyethyl modified nucleotide with phosphorothioate linkage
  modified_base 6: mod_base = OTHER; note = Nucleotide with phosphorothioate linkage
  modified_base 7: mod_base = OTHER; note = Nucleotide with phosphorothioate linkage
  modified_base 8: mod_base = OTHER; note = Thymine with phosphorothioate linkage
  modified_base 9: mod_base = OTHER; note = Nucleotide with phosphorothioate linkage
  modified_base 10: mod_base = OTHER; note = 2'-O-methyl modified abasic nucleotide with phosphorothioate linkage
  modified_base 11: mod_base = OTHER; note = Nucleotide with phosphorothioate linkage
  modified_base 12: mod_base = OTHER; note = Nucleotide with phosphorothioate linkage
  modified_base 13: mod_base = OTHER; note = 5-methylcytosine with phosphorothioate linkage
  modified_base 14: mod_base = OTHER; note = Nucleotide with phosphorothioate linkage
  modified_base 15: mod_base = OTHER; note = Nucleotide with phosphorothioate linkage
  modified_base 16: mod_base = OTHER; note = 2'-O-methoxyethyl modified nucleotide with phosphorothioate linkage
  modified_base 17: mod_base = OTHER; note = 2'-O-methoxyethyl modified nucleotide with phosphorothioate linkage
  modified_base 18: mod_base = OTHER; note = Locked thymine with phosphorothioate linkage
  modified_base 19: mod_base = OTHER; note = 2'-O-methoxyethyl modified nucleotide with phosphorothioate linkage
  modified_base 20: mod_base = OTHER; note = 2'-O-methoxyethyl 5-methylcytosine
  misc_feature 1..5: note = RNA
  misc_feature 6..9: note = DNA
  misc_feature 10: note = RNA
  misc_feature 11..15: note = DNA
  misc_feature 16..20: note = RNA
gcagaggtgnagcgaagtgc

SEQ ID NO: 1297 - DNA, 20 bp, synthetic construct
  source 1..20: mol_type = other DNA
  modified_base 1: mod_base = OTHER; note = 2'-O-methoxyethyl modified nucleotide with phosphorothioate linkage
  modified_base 2: mod_base = OTHER; note = 2'-O-methoxyethyl 5-methylcytosine with phosphorothioate linkage
  modified_base 3: mod_base = OTHER; note = Locked nucleic acid with phosphorothioate linkage
  modified_base 4: mod_base = OTHER; note = 2'-O-methoxyethyl modified nucleotide with phosphorothioate linkage
  modified_base 5: mod_base = OTHER; note = 2'-O-methoxyethyl modified nucleotide with phosphorothioate linkage
  modified_base 6: mod_base = OTHER; note = Nucleotide with phosphorothioate linkage
  modified_base 7: mod_base = OTHER; note = Nucleotide with phosphorothioate linkage
  modified_base 8: mod_base = OTHER; note = Thymine with phosphorothioate linkage
  modified_base 9: mod_base = OTHER; note = Nucleotide with phosphorothioate linkage
  modified_base 10: mod_base = OTHER; note = 2'-O-methyl modified abasic nucleotide with phosphorothioate linkage
  modified_base 11: mod_base = OTHER; note = Nucleotide with phosphorothioate linkage
  modified_base 12: mod_base = OTHER; note = Nucleotide with phosphorothioate linkage
  modified_base 13: mod_base = OTHER; note = 5-methylcytosine with phosphorothioate linkage
  modified_base 14: mod_base = OTHER; note = Nucleotide with phosphorothioate linkage
  modified_base 15: mod_base = OTHER; note = Nucleotide with phosphorothioate linkage
  modified_base 16: mod_base = OTHER; note = 2'-O-methoxyethyl modified nucleotide with phosphorothioate linkage
  modified_base 17: mod_base = OTHER; note = Locked nucleic acid with phosphorothioate linkage
  modified_base 18: mod_base = OTHER; note = 2'-O-methoxyethyl modified thymine with phosphorothioate linkage
  modified_base 19: mod_base = OTHER; note = 2'-O-methoxyethyl modified nucleotide with phosphorothioate linkage
  modified_base 20: mod_base = OTHER; note = 2'-O-methoxyethyl 5-methylcytosine
  misc_feature 1..5: note = RNA
  misc_feature 6..9: note = DNA
  misc_feature 10: note = RNA
  misc_feature 11..15: note = DNA
  misc_feature 16..20: note = RNA
gcagaggtgnagcgaagtgc

SEQ ID NO: 1298 - DNA, 20 bp, synthetic construct
  source 1..20: mol_type = other DNA
  modified_base 1: mod_base = OTHER; note = 2'-O-methoxyethyl modified nucleotide with phosphorothioate linkage
  modified_base 2: mod_base = OTHER; note = 2'-O-methoxyethyl 5-methylcytosine with phosphorothioate linkage
  modified_base 3: mod_base = OTHER; note = Locked nucleic acid with phosphorothioate linkage
  modified_base 4: mod_base = OTHER; note = 2'-O-methoxyethyl modified nucleotide with phosphorothioate linkage
  modified_base 5: mod_base = OTHER; note = 2'-O-methoxyethyl modified nucleotide with phosphorothioate linkage
  modified_base 6: mod_base = OTHER; note = Nucleotide with phosphorothioate linkage
  modified_base 7: mod_base = OTHER; note = Nucleotide with phosphorothioate linkage
  modified_base 8: mod_base = OTHER; note = Thymine with phosphorothioate linkage
  modified_base 9: mod_base = OTHER; note = Nucleotide with phosphorothioate linkage
  modified_base 10: mod_base = OTHER; note = 2'-O-methyl modified abasic nucleotide with phosphorothioate linkage
  modified_base 11: mod_base = OTHER; note = Nucleotide with phosphorothioate linkage
  modified_base 12: mod_base = OTHER; note = Nucleotide with phosphorothioate linkage
  modified_base 13: mod_base = OTHER; note = 5-methylcytosine with phosphorothioate linkage
  modified_base 14: mod_base = OTHER; note = Nucleotide with phosphorothioate linkage
  modified_base 15: mod_base = OTHER; note = Nucleotide with phosphorothioate linkage
  modified_base 16: mod_base = OTHER; note = Locked nucleic acid with phosphorothioate linkage
  modified_base 17: mod_base = OTHER; note = 2'-O-methoxyethyl modified nucleotide with phosphorothioate linkage
  modified_base 18: mod_base = OTHER; note = 2'-O-methoxyethyl modified thymine with phosphorothioate linkage
  modified_base 19: mod_base = OTHER; note = 2'-O-methoxyethyl modified nucleotide with phosphorothioate linkage
  modified_base 20: mod_base = OTHER; note = 2'-O-methoxyethyl 5-methylcytosine
  misc_feature 1..5: note = RNA
  misc_feature 6..9: note = DNA
  misc_feature 10: note = RNA
  misc_feature 11..15: note = DNA
  misc_feature 16..20: note = RNA
gcagaggtgnagcgaagtgc

SEQ ID NO: 1299 - DNA, 20 bp, synthetic construct
  source 1..20: mol_type = other DNA
  modified_base 1: mod_base = OTHER; note = 2'-O-methoxyethyl modified nucleotide with phosphorothioate linkage
  modified_base 2: mod_base = OTHER; note = 2'-O-methoxyethyl 5-methylcytosine with phosphorothioate linkage
  modified_base 3: mod_base = OTHER; note = Locked nucleic acid with phosphorothioate linkage
  modified_base 4: mod_base = OTHER; note = 2'-O-methoxyethyl modified nucleotide with phosphorothioate linkage
  modified_base 5: mod_base = OTHER; note = Locked nucleic acid with phosphorothioate linkage
  modified_base 6: mod_base = OTHER; note = Nucleotide with phosphorothioate linkage
  modified_base 7: mod_base = OTHER; note = Nucleotide with phosphorothioate linkage
  modified_base 8: mod_base = OTHER; note = Thymine with phosphorothioate linkage
  modified_base 9: mod_base = OTHER; note = Nucleotide with phosphorothioate linkage
  modified_base 10: mod_base = OTHER; note = 2'-O-methyl modified abasic nucleotide with phosphorothioate linkage
  modified_base 11: mod_base = OTHER; note = Nucleotide with phosphorothioate linkage
  modified_base 12: mod_base = OTHER; note = Nucleotide with phosphorothioate linkage
  modified_base 13: mod_base = OTHER; note = 5-methylcytosine with phosphorothioate linkage
  modified_base 14: mod_base = OTHER; note = Nucleotide with phosphorothioate linkage
  modified_base 15: mod_base = OTHER; note = Nucleotide with phosphorothioate linkage
  modified_base 16: mod_base = OTHER; note = 2'-O-methoxyethyl modified nucleotide with phosphorothioate linkage
  modified_base 17: mod_base = OTHER; note = 2'-O-methoxyethyl modified nucleotide with phosphorothioate linkage
  modified_base 18: mod_base = OTHER; note = 2'-O-methoxyethyl modified thymine with phosphorothioate linkage
  modified_base 19: mod_base = OTHER; note = 2'-O-methoxyethyl modified nucleotide with phosphorothioate linkage
  modified_base 20: mod_base = OTHER; note = 2'-O-methoxyethyl 5-methylcytosine
  misc_feature 1..5: note = RNA
  misc_feature 6..9: note = DNA
  misc_feature 10: note = RNA
  misc_feature 11..15: note = DNA
  misc_feature 16..20: note = RNA
gcagaggtgnagcgaagtgc

SEQ ID NO: 1300 - DNA, 20 bp, synthetic construct
  source 1..20: mol_type = other DNA
  modified_base 1: mod_base = OTHER; note = 2'-O-methoxyethyl modified nucleotide with phosphorothioate linkage
  modified_base 2: mod_base = OTHER; note = 2'-O-methoxyethyl 5-methylcytosine with phosphorothioate linkage
  modified_base 3: mod_base = OTHER; note = Locked nucleic acid with phosphorothioate linkage
  modified_base 4: mod_base = OTHER; note = Locked nucleic acid with phosphorothioate linkage
  modified_base 5: mod_base = OTHER; note = 2'-O-methoxyethyl modified nucleotide with phosphorothioate linkage
  modified_base 6: mod_base = OTHER; note = Nucleotide with phosphorothioate linkage
  modified_base 7: mod_base = OTHER; note = Nucleotide with phosphorothioate linkage
  modified_base 8: mod_base = OTHER; note = Thymine with phosphorothioate linkage
  modified_base 9: mod_base = OTHER; note = Nucleotide with phosphorothioate linkage
  modified_base 10: mod_base = OTHER; note = 2'-O-methyl modified abasic nucleotide with phosphorothioate linkage
  modified_base 11: mod_base = OTHER; note = Nucleotide with phosphorothioate linkage
  modified_base 12: mod_base = OTHER; note = Nucleotide with phosphorothioate linkage
  modified_base 13: mod_base = OTHER; note = 5-methylcytosine with phosphorothioate linkage
  modified_base 14: mod_base = OTHER; note = Nucleotide with phosphorothioate linkage
  modified_base 15: mod_base = OTHER; note = Nucleotide with phosphorothioate linkage
  modified_base 16: mod_base = OTHER; note = 2'-O-methoxyethyl modified nucleotide with phosphorothioate linkage
  modified_base 17: mod_base = OTHER; note = 2'-O-methoxyethyl modified nucleotide with phosphorothioate linkage
  modified_base 18: mod_base = OTHER; note = 2'-O-methoxyethyl modified thymine with phosphorothioate linkage
  modified_base 19: mod_base = OTHER; note = 2'-O-methoxyethyl modified nucleotide with phosphorothioate linkage
  modified_base 20: mod_base = OTHER; note = 2'-O-methoxyethyl 5-methylcytosine
  misc_feature 1..5: note = RNA
  misc_feature 6..9: note = DNA
  misc_feature 10: note = RNA
  misc_feature 11..15: note = DNA
  misc_feature 16..20: note = RNA
gcagaggtgnagcgaagtgc

SEQ ID NO: 1301 - DNA, 20 bp, synthetic construct
  source 1..20: mol_type = other DNA
  modified_base 1: mod_base = OTHER; note = 2'-O-methoxyethyl modified nucleotide with phosphorothioate linkage
  modified_base 2: mod_base = OTHER; note = Locked 5-methylcytosine with phosphorothioate linkage
  modified_base 3: mod_base = OTHER; note = 2'-O-methoxyethyl modified nucleotide with phosphorothioate linkage
  modified_base 4: mod_base = OTHER; note = 2'-O-methoxyethyl modified nucleotide with phosphorothioate linkage
  modified_base 5: mod_base = OTHER; note = 2'-O-methoxyethyl modified nucleotide with phosphorothioate linkage
  modified_base 6: mod_base = OTHER; note = Nucleotide with phosphorothioate linkage
  modified_base 7: mod_base = OTHER; note = Nucleotide with phosphorothioate linkage
  modified_base 8: mod_base = OTHER; note = Thymine with phosphorothioate linkage
  modified_base 9: mod_base = OTHER; note = Nucleotide with phosphorothioate linkage
  modified_base 10: mod_base = OTHER; note = 2'-O-methyl modified abasic nucleotide with phosphorothioate linkage
  modified_base 11: mod_base = OTHER; note = Nucleotide with phosphorothioate linkage
  modified_base 12: mod_base = OTHER; note = Nucleotide with phosphorothioate linkage
  modified_base 13: mod_base = OTHER; note = 5-methylcytosine with phosphorothioate linkage
  modified_base 14: mod_base = OTHER; note = Nucleotide with phosphorothioate linkage
  modified_base 15: mod_base = OTHER; note = Nucleotide with phosphorothioate linkage
  modified_base 16: mod_base = OTHER; note = 2'-O-methoxyethyl modified nucleotide with phosphorothioate linkage
  modified_base 17: mod_base = OTHER; note = 2'-O-methoxyethyl modified nucleotide with phosphorothioate linkage
  modified_base 18: mod_base = OTHER; note = 2'-O-methoxyethyl modified thymine with phosphorothioate linkage
  modified_base 19: mod_base = OTHER; note = 2'-O-methoxyethyl modified nucleotide with phosphorothioate linkage
  modified_base 20: mod_base = OTHER; note = Locked 5-methylcytosine
  misc_feature 1..5: note = RNA
  misc_feature 6..9: note = DNA
  misc_feature 10: note = RNA
  misc_feature 11..15: note = DNA
  misc_feature 16..20: note = RNA
gcagaggtgnagcgaagtgc

SEQ ID NO: 1302 - DNA, 20 bp, synthetic construct
  source 1..20: mol_type = other DNA
  modified_base 1: mod_base = OTHER; note = 2'-O-methoxyethyl modified nucleotide with phosphorothioate linkage
  modified_base 2: mod_base = OTHER; note = Locked 5-methylcytosine with phosphorothioate linkage
  modified_base 3: mod_base = OTHER; note = 2'-O-methoxyethyl modified nucleotide with phosphorothioate linkage
  modified_base 4: mod_base = OTHER; note = 2'-O-methoxyethyl modified nucleotide with phosphorothioate linkage
  modified_base 5: mod_base = OTHER; note = 2'-O-methoxyethyl modified nucleotide with phosphorothioate linkage
  modified_base 6: mod_base = OTHER; note = Nucleotide with phosphorothioate linkage
  modified_base 7: mod_base = OTHER; note = Nucleotide with phosphorothioate linkage
  modified_base 8: mod_base = OTHER; note = Thymine with phosphorothioate linkage
  modified_base 9: mod_base = OTHER; note = Nucleotide with phosphorothioate linkage
  modified_base 10: mod_base = OTHER; note = 2'-O-methyl modified abasic nucleotide with phosphorothioate linkage
  modified_base 11: mod_base = OTHER; note = Nucleotide with phosphorothioate linkage
  modified_base 12: mod_base = OTHER; note = Nucleotide with phosphorothioate linkage
  modified_base 13: mod_base = OTHER; note = 5-methylcytosine with phosphorothioate linkage
  modified_base 14: mod_base = OTHER; note = Nucleotide with phosphorothioate linkage
  modified_base 15: mod_base = OTHER; note = Nucleotide with phosphorothioate linkage
  modified_base 16: mod_base = OTHER; note = 2'-O-methoxyethyl modified nucleotide with phosphorothioate linkage
  modified_base 17: mod_base = OTHER; note = 2'-O-methoxyethyl modified nucleotide with phosphorothioate linkage
  modified_base 18: mod_base = OTHER; note = 2'-O-methoxyethyl modified thymine with phosphorothioate linkage
  modified_base 19: mod_base = OTHER; note = Locked nucleic acid with phosphorothioate linkage
  modified_base 20: mod_base = OTHER; note = 2'-O-methoxyethyl 5-methylcytosine
  misc_feature 1..5: note = RNA
  misc_feature 6..9: note = DNA
  misc_feature 10: note = RNA
  misc_feature 11..15: note = DNA
  misc_feature 16..20: note = RNA
gcagaggtgnagcgaagtgc

SEQ ID NO: 1303 - DNA, 20 bp, synthetic construct
  source 1..20: mol_type = other DNA
  modified_base 1: mod_base = OTHER; note = 2'-O-methoxyethyl modified nucleotide with phosphorothioate linkage
  modified_base 2: mod_base = OTHER; note = Locked 5-methylcytosine with phosphorothioate linkage
  modified_base 3: mod_base = OTHER; note = 2'-O-methoxyethyl modified nucleotide with phosphorothioate linkage
  modified_base 4: mod_base = OTHER; note = 2'-O-methoxyethyl modified nucleotide with phosphorothioate linkage
  modified_base 5: mod_base = OTHER; note = 2'-O-methoxyethyl modified nucleotide with phosphorothioate linkage
  modified_base 6: mod_base = OTHER; note = Nucleotide with phosphorothioate linkage
  modified_base 7: mod_base = OTHER; note = Nucleotide with phosphorothioate linkage
  modified_base 8: mod_base = OTHER; note = Thymine with phosphorothioate linkage
  modified_base 9: mod_base = OTHER; note = Nucleotide with phosphorothioate linkage
  modified_base 10: mod_base = OTHER; note = 2'-O-methyl modified abasic nucleotide with phosphorothioate linkage
  modified_base 11: mod_base = OTHER; note = Nucleotide with phosphorothioate linkage
  modified_base 12: mod_base = OTHER; note = Nucleotide with phosphorothioate linkage
  modified_base 13: mod_base = OTHER; note = 5-methylcytosine with phosphorothioate linkage
  modified_base 14: mod_base = OTHER; note = Nucleotide with phosphorothioate linkage
  modified_base 15: mod_base = OTHER; note = Nucleotide with phosphorothioate linkage
  modified_base 16: mod_base = OTHER; note = 2'-O-methoxyethyl modified nucleotide with phosphorothioate linkage
  modified_base 17: mod_base = OTHER; note = 2'-O-methoxyethyl modified nucleotide with phosphorothioate linkage
  modified_base 18: mod_base = OTHER; note = Locked thymine with phosphorothioate linkage
  modified_base 19: mod_base = OTHER; note = 2'-O-methoxyethyl modified nucleotide with phosphorothioate linkage
  modified_base 20: mod_base = OTHER; note = 2'-O-methoxyethyl 5-methylcytosine
  misc_feature 1..5: note = RNA
  misc_feature 6..9: note = DNA
  misc_feature 10: note = RNA
  misc_feature 11..15: note = DNA
  misc_feature 16..20: note = RNA
gcagaggtgnagcgaagtgc

SEQ ID NO: 1304 - DNA, 20 bp, synthetic construct
  source 1..20: mol_type = other DNA
  modified_base 1: mod_base = OTHER; note = 2'-O-methoxyethyl modified nucleotide with phosphorothioate linkage
  modified_base 2: mod_base = OTHER; note = Locked 5-methylcytosine with phosphorothioate linkage
  modified_base 3: mod_base = OTHER; note = 2'-O-methoxyethyl modified nucleotide with phosphorothioate linkage
  modified_base 4: mod_base = OTHER; note = 2'-O-methoxyethyl modified nucleotide with phosphorothioate linkage
  modified_base 5: mod_base = OTHER; note = 2'-O-methoxyethyl modified nucleotide with phosphorothioate linkage
  modified_base 6: mod_base = OTHER; note = Nucleotide with phosphorothioate linkage
  modified_base 7: mod_base = OTHER; note = Nucleotide with phosphorothioate linkage
  modified_base 8: mod_base = OTHER; note = Thymine with phosphorothioate linkage
  modified_base 9: mod_base = OTHER; note = Nucleotide with phosphorothioate linkage
  modified_base 10: mod_base = OTHER; note = 2'-O-methyl modified abasic nucleotide with phosphorothioate linkage
  modified_base 11: mod_base = OTHER; note = Nucleotide with phosphorothioate linkage
  modified_base 12: mod_base = OTHER; note = Nucleotide with phosphorothioate linkage
  modified_base 13: mod_base = OTHER; note = 5-methylcytosine with phosphorothioate linkage
  modified_base 14: mod_base = OTHER; note = Nucleotide with phosphorothioate linkage
  modified_base 15: mod_base = OTHER; note = Nucleotide with phosphorothioate linkage
  modified_base 16: mod_base = OTHER; note = 2'-O-methoxyethyl modified nucleotide with phosphorothioate linkage
  modified_base 17: mod_base = OTHER; note = Locked nucleic acid with phosphorothioate linkage
  modified_base 18: mod_base = OTHER; note = 2'-O-methoxyethyl modified thymine with phosphorothioate linkage
  modified_base 19: mod_base = OTHER; note = 2'-O-methoxyethyl modified nucleotide with phosphorothioate linkage
  modified_base 20: mod_base = OTHER; note = 2'-O-methoxyethyl 5-methylcytosine
  misc_feature 1..5: note = RNA
  misc_feature 6..9: note = DNA
  misc_feature 10: note = RNA
  misc_feature 11..15: note = DNA
  misc_feature 16..20: note = RNA
gcagaggtgnagcgaagtgc

SEQ ID NO: 1305 - DNA, 20 bp, synthetic construct
  source 1..20: mol_type = other DNA
  modified_base 1: mod_base = OTHER; note = 2'-O-methoxyethyl modified nucleotide with phosphorothioate linkage
  modified_base 2: mod_base = OTHER; note = Locked 5-methylcytosine with phosphorothioate linkage
  modified_base 3: mod_base = OTHER; note = 2'-O-methoxyethyl modified nucleotide with phosphorothioate linkage
  modified_base 4: mod_base = OTHER; note = 2'-O-methoxyethyl modified nucleotide with phosphorothioate linkage
  modified_base 5: mod_base = OTHER; note = 2'-O-methoxyethyl modified nucleotide with phosphorothioate linkage
  modified_base 6: mod_base = OTHER; note = Nucleotide with phosphorothioate linkage
  modified_base 7: mod_base = OTHER; note = Nucleotide with phosphorothioate linkage
  modified_base 8: mod_base = OTHER; note = Thymine with phosphorothioate linkage
  modified_base 9: mod_base = OTHER; note = Nucleotide with phosphorothioate linkage
  modified_base 10: mod_base = OTHER; note = 2'-O-methyl modified abasic nucleotide with phosphorothioate linkage
  modified_base 11: mod_base = OTHER; note = Nucleotide with phosphorothioate linkage
  modified_base 12: mod_base = OTHER; note = Nucleotide with phosphorothioate linkage
  modified_base 13: mod_base = OTHER; note = 5-methylcytosine with phosphorothioate linkage
  modified_base 14: mod_base = OTHER; note = Nucleotide with phosphorothioate linkage
  modified_base 15: mod_base = OTHER; note = Nucleotide with phosphorothioate linkage
  modified_base 16: mod_base = OTHER; note = Locked nucleic acid with phosphorothioate linkage
  modified_base 17: mod_base = OTHER; note = 2'-O-methoxyethyl modified nucleotide with phosphorothioate linkage
  modified_base 18: mod_base = OTHER; note = 2'-O-methoxyethyl modified thymine with phosphorothioate linkage
  modified_base 19: mod_base = OTHER; note = 2'-O-methoxyethyl modified nucleotide with phosphorothioate linkage
  modified_base 20: mod_base = OTHER; note = 2'-O-methoxyethyl 5-methylcytosine
  misc_feature 1..5: note = RNA
  misc_feature 6..9: note = DNA
  misc_feature 10: note = RNA
  misc_feature 11..15: note = DNA
  misc_feature 16..20: note = RNA
gcagaggtgnagcgaagtgc

SEQ ID NO: 1306 - DNA, 20 bp, synthetic construct
  source 1..20: mol_type = other DNA
  modified_base 1: mod_base = OTHER; note = 2'-O-methoxyethyl modified nucleotide with phosphorothioate linkage
  modified_base 2: mod_base = OTHER; note = Locked 5-methylcytosine with phosphorothioate linkage
  modified_base 3: mod_base = OTHER; note = 2'-O-methoxyethyl modified nucleotide with phosphorothioate linkage
  modified_base 4: mod_base = OTHER; note = 2'-O-methoxyethyl modified nucleotide with phosphorothioate linkage
  modified_base 5: mod_base = OTHER; note = Locked nucleic acid with phosphorothioate linkage
  modified_base 6: mod_base = OTHER; note = Nucleotide with phosphorothioate linkage
  modified_base 7: mod_base = OTHER; note = Nucleotide with phosphorothioate linkage
  modified_base 8: mod_base = OTHER; note = Thymine with phosphorothioate linkage
  modified_base 9: mod_base = OTHER; note = Nucleotide with phosphorothioate linkage
  modified_base 10: mod_base = OTHER; note = 2'-O-methyl modified abasic nucleotide with phosphorothioate linkage
  modified_base 11: mod_base = OTHER; note = Nucleotide with phosphorothioate linkage
  modified_base 12: mod_base = OTHER; note = Nucleotide with phosphorothioate linkage
  modified_base 13: mod_base = OTHER; note = 5-methylcytosine with phosphorothioate linkage
  modified_base 14: mod_base = OTHER; note = Nucleotide with phosphorothioate linkage
  modified_base 15: mod_base = OTHER; note = Nucleotide with phosphorothioate linkage
  modified_base 16: mod_base = OTHER; note = 2'-O-methoxyethyl modified nucleotide with phosphorothioate linkage
  modified_base 17: mod_base = OTHER; note = 2'-O-methoxyethyl modified nucleotide with phosphorothioate linkage
  modified_base 18: mod_base = OTHER; note = 2'-O-methoxyethyl modified thymine with phosphorothioate linkage
  modified_base 19: mod_base = OTHER; note = 2'-O-methoxyethyl modified nucleotide with phosphorothioate linkage
  modified_base 20: mod_base = OTHER; note = 2'-O-methoxyethyl 5-methylcytosine
  misc_feature 1..5: note = RNA
  misc_feature 6..9: note = DNA
  misc_feature 10: note = RNA
  misc_feature 11..15: note = DNA
  misc_feature 16..20: note = RNA
gcagaggtgnagcgaagtgc

SEQ ID NO: 1307 - DNA, 20 bp, synthetic construct
  source 1..20: mol_type = other DNA
  modified_base 1: mod_base = OTHER; note = 2'-O-methoxyethyl modified nucleotide with phosphorothioate linkage
  modified_base 2: mod_base = OTHER; note = Locked 5-methylcytosine with phosphorothioate linkage
  modified_base 3: mod_base = OTHER; note = 2'-O-methoxyethyl modified nucleotide with phosphorothioate linkage
  modified_base 4: mod_base = OTHER; note = Locked nucleic acid with phosphorothioate linkage
  modified_base 5: mod_base = OTHER; note = 2'-O-methoxyethyl modified nucleotide with phosphorothioate linkage
  modified_base 6: mod_base = OTHER; note = Nucleotide with phosphorothioate linkage
  modified_base 7: mod_base = OTHER; note = Nucleotide with phosphorothioate linkage
  modified_base 8: mod_base = OTHER; note = Thymine with phosphorothioate linkage
  modified_base 9: mod_base = OTHER; note = Nucleotide with phosphorothioate linkage
  modified_base 10: mod_base = OTHER; note = 2'-O-methyl modified abasic nucleotide with phosphorothioate linkage
  modified_base 11: mod_base = OTHER; note = Nucleotide with phosphorothioate linkage
  modified_base 12: mod_base = OTHER; note = Nucleotide with phosphorothioate linkage
  modified_base 13: mod_base = OTHER; note = 5-methylcytosine with phosphorothioate linkage
  modified_base 14: mod_base = OTHER; note = Nucleotide with phosphorothioate linkage
  modified_base 15: mod_base = OTHER; note = Nucleotide with phosphorothioate linkage
  modified_base 16: mod_base = OTHER; note = 2'-O-methoxyethyl modified nucleotide with phosphorothioate linkage
  modified_base 17: mod_base = OTHER; note = 2'-O-methoxyethyl modified nucleotide with phosphorothioate linkage
  modified_base 18: mod_base = OTHER; note = 2'-O-methoxyethyl modified thymine with phosphorothioate linkage
  modified_base 19: mod_base = OTHER; note = 2'-O-methoxyethyl modified nucleotide with phosphorothioate linkage
  modified_base 20: mod_base = OTHER; note = 2'-O-methoxyethyl 5-methylcytosine
  misc_feature 1..5: note = RNA
  misc_feature 6..9: note = DNA
  misc_feature 10: note = RNA
  misc_feature 11..15: note = DNA
  misc_feature 16..20: note = RNA
gcagaggtgnagcgaagtgc

SEQ ID NO: 1308 - DNA, 20 bp, synthetic construct
  source 1..20: mol_type = other DNA
  modified_base 1: mod_base = OTHER; note = 2'-O-methoxyethyl modified nucleotide with phosphorothioate linkage
  modified_base 2: mod_base = OTHER; note = Locked 5-methylcytosine with phosphorothioate linkage
  modified_base 3: mod_base = OTHER; note = Locked nucleic acid with phosphorothioate linkage
  modified_base 4: mod_base = OTHER; note = 2'-O-methoxyethyl modified nucleotide with phosphorothioate linkage
  modified_base 5: mod_base = OTHER; note = 2'-O-methoxyethyl modified nucleotide with phosphorothioate linkage
  modified_base 6: mod_base = OTHER; note = Nucleotide with phosphorothioate linkage
  modified_base 7: mod_base = OTHER; note = Nucleotide with phosphorothioate linkage
  modified_base 8: mod_base = OTHER; note = Thymine with phosphorothioate linkage
  modified_base 9: mod_base = OTHER; note = Nucleotide with phosphorothioate linkage
  modified_base 10: mod_base = OTHER; note = 2'-O-methyl modified abasic nucleotide with phosphorothioate linkage
  modified_base 11: mod_base = OTHER; note = Nucleotide with phosphorothioate linkage
  modified_base 12: mod_base = OTHER; note = Nucleotide with phosphorothioate linkage
  modified_base 13: mod_base = OTHER; note = 5-methylcytosine with phosphorothioate linkage
  modified_base 14: mod_base = OTHER; note = Nucleotide with phosphorothioate linkage
  modified_base 15: mod_base = OTHER; note = Nucleotide with phosphorothioate linkage
  modified_base 16: mod_base = OTHER; note = 2'-O-methoxyethyl modified nucleotide with phosphorothioate linkage
  modified_base 17: mod_base = OTHER; note = 2'-O-methoxyethyl modified nucleotide with phosphorothioate linkage
  modified_base 18: mod_base = OTHER; note = 2'-O-methoxyethyl modified thymine with phosphorothioate linkage
  modified_base 19: mod_base = OTHER; note = 2'-O-methoxyethyl modified nucleotide with phosphorothioate linkage
  modified_base 20: mod_base = OTHER; note = 2'-O-methoxyethyl 5-methylcytosine
  misc_feature 1..5: note = RNA
  misc_feature 6..9: note = DNA
  misc_feature 10: note = RNA
  misc_feature 11..15: note = DNA
  misc_feature 16..20: note = RNA
gcagaggtgnagcgaagtgc

SEQ ID NO: 1309 - DNA, 20 bp, synthetic construct
  source 1..20: mol_type = other DNA
  modified_base 1: mod_base = OTHER; note = Locked nucleic acid with phosphorothioate linkage
  modified_base 2: mod_base = OTHER; note = 2'-O-methoxyethyl 5-methylcytosine with phosphorothioate linkage
  modified_base 3: mod_base = OTHER; note = 2'-O-methoxyethyl modified nucleotide with phosphorothioate linkage
  modified_base 4: mod_base = OTHER; note = 2'-O-methoxyethyl modified nucleotide with phosphorothioate linkage
  modified_base 5: mod_base = OTHER; note = 2'-O-methoxyethyl modified nucleotide with phosphorothioate linkage
  modified_base 6: mod_base = OTHER; note = Nucleotide with phosphorothioate linkage
  modified_base 7: mod_base = OTHER; note = Nucleotide with phosphorothioate linkage
  modified_base 8: mod_base = OTHER; note = Thymine with phosphorothioate linkage
  modified_base 9: mod_base = OTHER; note = Nucleotide with phosphorothioate linkage
  modified_base 10: mod_base = OTHER; note = 2'-O-methyl modified abasic nucleotide with phosphorothioate linkage
  modified_base 11: mod_base = OTHER; note = Nucleotide with phosphorothioate linkage
  modified_base 12: mod_base = OTHER; note = Nucleotide with phosphorothioate linkage
  modified_base 13: mod_base = OTHER; note = 5-methylcytosine with phosphorothioate linkage
  modified_base 14: mod_base = OTHER; note = Nucleotide with phosphorothioate linkage
  modified_base 15: mod_base = OTHER; note = Nucleotide with phosphorothioate linkage
  modified_base 16: mod_base = OTHER; note = 2'-O-methoxyethyl modified nucleotide with phosphorothioate linkage
  modified_base 17: mod_base = OTHER; note = 2'-O-methoxyethyl modified nucleotide with phosphorothioate linkage
  modified_base 18: mod_base = OTHER; note = 2'-O-methoxyethyl modified thymine with phosphorothioate linkage
  modified_base 19: mod_base = OTHER; note = 2'-O-methoxyethyl modified nucleotide with phosphorothioate linkage
  modified_base 20: mod_base = OTHER; note = Locked 5-methylcytosine
  misc_feature 1..5: note = RNA
  misc_feature 6..9: note = DNA
  misc_feature 10: note = RNA
  misc_feature 11..15: note = DNA
  misc_feature 16..20: note = RNA
gcagaggtgnagcgaagtgc

SEQ ID NO: 1310 - DNA, 20 bp, synthetic construct
  source 1..20: mol_type = other DNA
  modified_base 1: mod_base = OTHER; note = Locked nucleic acid with phosphorothioate linkage
  modified_base 2: mod_base = OTHER; note = 2'-O-methoxyethyl 5-methylcytosine with phosphorothioate linkage
  modified_base 3: mod_base = OTHER; note = 2'-O-methoxyethyl modified nucleotide with phosphorothioate linkage
  modified_base 4: mod_base = OTHER; note = 2'-O-methoxyethyl modified nucleotide with phosphorothioate linkage
  modified_base 5: mod_base = OTHER; note = 2'-O-methoxyethyl modified nucleotide with phosphorothioate linkage
  modified_base 6: mod_base = OTHER; note = Nucleotide with phosphorothioate linkage
  modified_base 7: mod_base = OTHER; note = Nucleotide with phosphorothioate linkage
  modified_base 8: mod_base = OTHER; note = Thymine with phosphorothioate linkage
  modified_base 9: mod_base = OTHER; note = Nucleotide with phosphorothioate linkage
  modified_base 10: mod_base = OTHER; note = 2'-O-methyl modified abasic nucleotide with phosphorothioate linkage
  modified_base 11: mod_base = OTHER; note = Nucleotide with phosphorothioate linkage
  modified_base 12: mod_base = OTHER; note = Nucleotide with phosphorothioate linkage
  modified_base 13: mod_base = OTHER; note = 5-methylcytosine with phosphorothioate linkage
  modified_base 14: mod_base = OTHER; note = Nucleotide with phosphorothioate linkage
  modified_base 15: mod_base = OTHER; note = Nucleotide with phosphorothioate linkage
  modified_base 16: mod_base = OTHER; note = 2'-O-methoxyethyl modified nucleotide with phosphorothioate linkage
  modified_base 17: mod_base = OTHER; note = 2'-O-methoxyethyl modified nucleotide with phosphorothioate linkage
  modified_base 18: mod_base = OTHER; note = 2'-O-methoxyethyl modified thymine with phosphorothioate linkage
  modified_base 19: mod_base = OTHER; note = Locked nucleic acid with phosphorothioate linkage
  modified_base 20: mod_base = OTHER; note = 2'-O-methoxyethyl 5-methylcytosine
  misc_feature 1..5: note = RNA
  misc_feature 6..9: note = DNA
  misc_feature 10: note = RNA
  misc_feature 11..15: note = DNA
  misc_feature 16..20: note = RNA
gcagaggtgnagcgaagtgc

SEQ ID NO: 1311 - DNA, 20 bp, synthetic construct
  source 1..20: mol_type = other DNA
  modified_base 1: mod_base = OTHER; note = Locked nucleic acid with phosphorothioate linkage
  modified_base 2: mod_base = OTHER; note = 2'-O-methoxyethyl 5-methylcytosine with phosphorothioate linkage
  modified_base 3: mod_base = OTHER; note = 2'-O-methoxyethyl modified nucleotide with phosphorothioate linkage
  modified_base 4: mod_base = OTHER; note = 2'-O-methoxyethyl modified nucleotide with phosphorothioate linkage
  modified_base 5: mod_base = OTHER; note = 2'-O-methoxyethyl modified nucleotide with phosphorothioate linkage
  modified_base 6: mod_base = OTHER; note = Nucleotide with phosphorothioate linkage
  modified_base 7: mod_base = OTHER; note = Nucleotide with phosphorothioate linkage
  modified_base 8: mod_base = OTHER; note = Thymine with phosphorothioate linkage
  modified_base 9: mod_base = OTHER; note = Nucleotide with phosphorothioate linkage
  modified_base 10: mod_base = OTHER; note = 2'-O-methyl modified abasic nucleotide with phosphorothioate linkage
  modified_base 11: mod_base = OTHER; note = Nucleotide with phosphorothioate linkage
  modified_base 12: mod_base = OTHER; note = Nucleotide with phosphorothioate linkage
  modified_base 13: mod_base = OTHER; note = 5-methylcytosine with phosphorothioate linkage
  modified_base 14: mod_base = OTHER; note = Nucleotide with phosphorothioate linkage
  modified_base 15: mod_base = OTHER; note = Nucleotide with phosphorothioate linkage
  modified_base 16: mod_base = OTHER; note = 2'-O-methoxyethyl modified nucleotide with phosphorothioate linkage
  modified_base 17: mod_base = OTHER; note = 2'-O-methoxyethyl modified nucleotide with phosphorothioate linkage
  modified_base 18: mod_base = OTHER; note = Locked thymine with phosphorothioate linkage
  modified_base 19: mod_base = OTHER; note = 2'-O-methoxyethyl modified nucleotide with phosphorothioate linkage
  modified_base 20: mod_base = OTHER; note = 2'-O-methoxyethyl 5-methylcytosine
  misc_feature 1..5: note = RNA
  misc_feature 6..9: note = DNA
  misc_feature 10: note = RNA
  misc_feature 11..15: note = DNA
  misc_feature 16..20: note = RNA
gcagaggtgnagcgaagtgc

SEQ ID NO: 1312 - DNA, 20 bp, synthetic construct
  source 1..20: mol_type = other DNA
  modified_base 1: mod_base = OTHER; note = Locked nucleic acid with phosphorothioate linkage
  modified_base 2: mod_base = OTHER; note = 2'-O-methoxyethyl 5-methylcytosine with phosphorothioate linkage
  modified_base 3: mod_base = OTHER; note = 2'-O-methoxyethyl modified nucleotide with phosphorothioate linkage
  modified_base 4: mod_base = OTHER; note = 2'-O-methoxyethyl modified nucleotide with phosphorothioate linkage
  modified_base 5: mod_base = OTHER; note = 2'-O-methoxyethyl modified nucleotide with phosphorothioate linkage
  modified_base 6: mod_base = OTHER; note = Nucleotide with phosphorothioate linkage
  modified_base 7: mod_base = OTHER; note = Nucleotide with phosphorothioate linkage
  modified_base 8: mod_base = OTHER; note = Thymine with phosphorothioate linkage
  modified_base 9: mod_base = OTHER; note = Nucleotide with phosphorothioate linkage
  modified_base 10: mod_base = OTHER; note = 2'-O-methyl modified abasic nucleotide with phosphorothioate linkage
  modified_base 11: mod_base = OTHER; note = Nucleotide with phosphorothioate linkage
  modified_base 12: mod_base = OTHER; note = Nucleotide with phosphorothioate linkage
  modified_base 13: mod_base = OTHER; note = 5-methylcytosine with phosphorothioate linkage
  modified_base 14: mod_base = OTHER; note = Nucleotide with phosphorothioate linkage
  modified_base 15: mod_base = OTHER; note = Nucleotide with phosphorothioate linkage
  modified_base 16: mod_base = OTHER; note = 2'-O-methoxyethyl modified nucleotide with phosphorothioate linkage
  modified_base 17: mod_base = OTHER; note = Locked nucleic acid with phosphorothioate linkage
  modified_base 18: mod_base = OTHER; note = 2'-O-methoxyethyl modified thymine with phosphorothioate linkage
  modified_base 19: mod_base = OTHER; note = 2'-O-methoxyethyl modified nucleotide with phosphorothioate linkage
  modified_base 20: mod_base = OTHER; note = 2'-O-methoxyethyl 5-methylcytosine
  misc_feature 1..5: note = RNA
  misc_feature 6..9: note = DNA
  misc_feature 10: note = RNA
  misc_feature 11..15: note = DNA
  misc_feature 16..20: note = RNA
gcagaggtgnagcgaagtgc

SEQ ID NO: 1313 - DNA, 20 bp, synthetic construct
  source 1..20: mol_type = other DNA
  modified_base 1: mod_base = OTHER; note = Locked nucleic acid with phosphorothioate linkage
  modified_base 2: mod_base = OTHER; note = 2'-O-methoxyethyl 5-methylcytosine with phosphorothioate linkage
  modified_base 3: mod_base = OTHER; note = 2'-O-methoxyethyl modified nucleotide with phosphorothioate linkage
  modified_base 4: mod_base = OTHER; note = 2'-O-methoxyethyl modified nucleotide with phosphorothioate linkage
  modified_base 5: mod_base = OTHER; note = 2'-O-methoxyethyl modified nucleotide with phosphorothioate linkage
  modified_base 6: mod_base = OTHER; note = Nucleotide with phosphorothioate linkage
  modified_base 7: mod_base = OTHER; note = Nucleotide with phosphorothioate linkage
  modified_base 8: mod_base = OTHER; note = Thymine with phosphorothioate linkage
  modified_base 9: mod_base = OTHER; note = Nucleotide with phosphorothioate linkage
  modified_base 10: mod_base = OTHER; note = 2'-O-methyl modified abasic nucleotide with phosphorothioate linkage
  modified_base 11: mod_base = OTHER; note = Nucleotide with phosphorothioate linkage
  modified_base 12: mod_base = OTHER; note = Nucleotide with phosphorothioate linkage
  modified_base 13: mod_base = OTHER; note = 5-methylcytosine with phosphorothioate linkage
  modified_base 14: mod_base = OTHER; note = Nucleotide with phosphorothioate linkage
  modified_base 15: mod_base = OTHER; note = Nucleotide with phosphorothioate linkage
  modified_base 16: mod_base = OTHER; note = Locked nucleic acid with phosphorothioate linkage
  modified_base 17: mod_base = OTHER; note = 2'-O-methoxyethyl modified nucleotide with phosphorothioate linkage
  modified_base 18: mod_base = OTHER; note = 2'-O-methoxyethyl modified thymine with phosphorothioate linkage
  modified_base 19: mod_base = OTHER; note = 2'-O-methoxyethyl modified nucleotide with phosphorothioate linkage
  modified_base 20: mod_base = OTHER; note = 2'-O-methoxyethyl 5-methylcytosine
  misc_feature 1..5: note = RNA
  misc_feature 6..9: note = DNA
  misc_feature 10: note = RNA
  misc_feature 11..15: note = DNA
  misc_feature 16..20: note = RNA
gcagaggtgnagcgaagtgc

SEQ ID NO: 1314 - DNA, 20 bp, synthetic construct
  source 1..20: mol_type = other DNA
  modified_base 1: mod_base = OTHER; note = Locked nucleic acid with phosphorothioate linkage
  modified_base 2: mod_base = OTHER; note = 2'-O-methoxyethyl 5-methylcytosine with phosphorothioate linkage
  modified_base 3: mod_base = OTHER; note = 2'-O-methoxyethyl modified nucleotide with phosphorothioate linkage
  modified_base 4: mod_base = OTHER; note = 2'-O-methoxyethyl modified nucleotide with phosphorothioate linkage
  modified_base 5: mod_base = OTHER; note = Locked nucleic acid with phosphorothioate linkage
  modified_base 6: mod_base = OTHER; note = Nucleotide with phosphorothioate linkage
  modified_base 7: mod_base = OTHER; note = Nucleotide with phosphorothioate linkage
  modified_base 8: mod_base = OTHER; note = Thymine with phosphorothioate linkage
  modified_base 9: mod_base = OTHER; note = Nucleotide with phosphorothioate linkage
  modified_base 10: mod_base = OTHER; note = 2'-O-methyl modified abasic nucleotide with phosphorothioate linkage
  modified_base 11: mod_base = OTHER; note = Nucleotide with phosphorothioate linkage
  modified_base 12: mod_base = OTHER; note = Nucleotide with phosphorothioate linkage
  modified_base 13: mod_base = OTHER; note = 5-methylcytosine with phosphorothioate linkage
  modified_base 14: mod_base = OTHER; note = Nucleotide with phosphorothioate linkage
  modified_base 15: mod_base = OTHER; note = Nucleotide with phosphorothioate linkage
  modified_base 16: mod_base = OTHER; note = 2'-O-methoxyethyl modified nucleotide with phosphorothioate linkage
  modified_base 17: mod_base = OTHER; note = 2'-O-methoxyethyl modified nucleotide with phosphorothioate linkage
  modified_base 18: mod_base = OTHER; note = 2'-O-methoxyethyl modified thymine with phosphorothioate linkage
  modified_base 19: mod_base = OTHER; note = 2'-O-methoxyethyl modified nucleotide with phosphorothioate linkage
  modified_base 20: mod_base = OTHER; note = 2'-O-methoxyethyl 5-methylcytosine
  misc_feature 1..5: note = RNA
  misc_feature 6..9: note = DNA
  misc_feature 10: note = RNA
  misc_feature 11..15: note = DNA
  misc_feature 16..20: note = RNA
gcagaggtgnagcgaagtgc

SEQ ID NO: 1315 - DNA, 20 bp, synthetic construct
  source 1..20: mol_type = other DNA
  modified_base 1: mod_base = OTHER; note = Locked nucleic acid with phosphorothioate linkage
  modified_base 2: mod_base = OTHER; note = 2'-O-methoxyethyl 5-methylcytosine with phosphorothioate linkage
  modified_base 3: mod_base = OTHER; note = 2'-O-methoxyethyl modified nucleotide with phosphorothioate linkage
  modified_base 4: mod_base = OTHER; note = Locked nucleic acid with phosphorothioate linkage
  modified_base 5: mod_base = OTHER; note = 2'-O-methoxyethyl modified nucleotide with phosphorothioate linkage
  modified_base 6: mod_base = OTHER; note = Nucleotide with phosphorothioate linkage
  modified_base 7: mod_base = OTHER; note = Nucleotide with phosphorothioate linkage
  modified_base 8: mod_base = OTHER; note = Thymine with phosphorothioate linkage
  modified_base 9: mod_base = OTHER; note = Nucleotide with phosphorothioate linkage
  modified_base 10: mod_base = OTHER; note = 2'-O-methyl modified abasic nucleotide with phosphorothioate linkage
  modified_base 11: mod_base = OTHER; note = Nucleotide with phosphorothioate linkage
  modified_base 12: mod_base = OTHER; note = Nucleotide with phosphorothioate linkage
  modified_base 13: mod_base = OTHER; note = 5-methylcytosine with phosphorothioate linkage
  modified_base 14: mod_base = OTHER; note = Nucleotide with phosphorothioate linkage
  modified_base 15: mod_base = OTHER; note = Nucleotide with phosphorothioate linkage
  modified_base 16: mod_base = OTHER; note = 2'-O-methoxyethyl modified nucleotide with phosphorothioate linkage
  modified_base 17: mod_base = OTHER; note = 2'-O-methoxyethyl modified nucleotide with phosphorothioate linkage
  modified_base 18: mod_base = OTHER; note = 2'-O-methoxyethyl modified thymine with phosphorothioate linkage
  modified_base 19: mod_base = OTHER; note = 2'-O-methoxyethyl modified nucleotide with phosphorothioate linkage
  modified_base 20: mod_base = OTHER; note = 2'-O-methoxyethyl 5-methylcytosine
  misc_feature 1..5: note = RNA
  misc_feature 6..9: note = DNA
  misc_feature 10: note = RNA
  misc_feature 11..15: note = DNA
  misc_feature 16..20: note = RNA
gcagaggtgnagcgaagtgc

SEQ ID NO: 1316 - DNA, 20 bp, synthetic construct
  source 1..20: mol_type = other DNA
  modified_base 1: mod_base = OTHER; note = Locked nucleic acid with phosphorothioate linkage
  modified_base 2: mod_base = OTHER; note = 2'-O-methoxyethyl 5-methylcytosine with phosphorothioate linkage
  modified_base 3: mod_base = OTHER; note = Locked nucleic acid with phosphorothioate linkage
  modified_base 4: mod_base = OTHER; note = 2'-O-methoxyethyl modified nucleotide with phosphorothioate linkage
  modified_base 5: mod_base = OTHER; note = 2'-O-methoxyethyl modified nucleotide with phosphorothioate linkage
  modified_base 6: mod_base = OTHER; note = Nucleotide with phosphorothioate linkage
  modified_base 7: mod_base = OTHER; note = Nucleotide with phosphorothioate linkage
  modified_base 8: mod_base = OTHER; note = Thymine with phosphorothioate linkage
  modified_base 9: mod_base = OTHER; note = Nucleotide with phosphorothioate linkage
  modified_base 10: mod_base = OTHER; note = 2'-O-methyl modified abasic nucleotide with phosphorothioate linkage
  modified_base 11: mod_base = OTHER; note = Nucleotide with phosphorothioate linkage
  modified_base 12: mod_base = OTHER; note = Nucleotide with phosphorothioate linkage
  modified_base 13: mod_base = OTHER; note = 5-methylcytosine with phosphorothioate linkage
  modified_base 14: mod_base = OTHER; note = Nucleotide with phosphorothioate linkage
  modified_base 15: mod_base = OTHER; note = Nucleotide with phosphorothioate linkage
  modified_base 16: mod_base = OTHER; note = 2'-O-methoxyethyl modified nucleotide with phosphorothioate linkage
  modified_base 17: mod_base = OTHER; note = 2'-O-methoxyethyl modified nucleotide with phosphorothioate linkage
  modified_base 18: mod_base = OTHER; note = 2'-O-methoxyethyl modified thymine with phosphorothioate linkage
  modified_base 19: mod_base = OTHER; note = 2'-O-methoxyethyl modified nucleotide with phosphorothioate linkage
  modified_base 20: mod_base = OTHER; note = 2'-O-methoxyethyl 5-methylcytosine
  misc_feature 1..5: note = RNA
  misc_feature 6..9: note = DNA
  misc_feature 10: note = RNA
  misc_feature 11..15: note = DNA
  misc_feature 16..20: note = RNA
gcagaggtgnagcgaagtgc

SEQ ID NO: 1317 - DNA, 20 bp, synthetic construct
  source 1..20: mol_type = other DNA
  modified_base 1: mod_base = OTHER; note = Locked nucleic acid with phosphorothioate linkage
  modified_base 2: mod_base = OTHER; note = Locked 5-methylcytosine with phosphorothioate linkage
  modified_base 3: mod_base = OTHER; note = 2'-O-methoxyethyl modified nucleotide with phosphorothioate linkage
  modified_base 4: mod_base = OTHER; note = 2'-O-methoxyethyl modified nucleotide with phosphorothioate linkage
  modified_base 5: mod_base = OTHER; note = 2'-O-methoxyethyl modified nucleotide with phosphorothioate linkage
  modified_base 6: mod_base = OTHER; note = Nucleotide with phosphorothioate linkage
  modified_base 7: mod_base = OTHER; note = Nucleotide with phosphorothioate linkage
  modified_base 8: mod_base = OTHER; note = Thymine with phosphorothioate linkage
  modified_base 9: mod_base = OTHER; note = Nucleotide with phosphorothioate linkage
  modified_base 10: mod_base = OTHER; note = 2'-O-methyl modified abasic nucleotide with phosphorothioate linkage
  modified_base 11: mod_base = OTHER; note = Nucleotide with phosphorothioate linkage
  modified_base 12: mod_base = OTHER; note = Nucleotide with phosphorothioate linkage
  modified_base 13: mod_base = OTHER; note = 5-methylcytosine with phosphorothioate linkage
  modified_base 14: mod_base = OTHER; note = Nucleotide with phosphorothioate linkage
  modified_base 15: mod_base = OTHER; note = Nucleotide with phosphorothioate linkage
  modified_base 16: mod_base = OTHER; note = 2'-O-methoxyethyl modified nucleotide with phosphorothioate linkage
  modified_base 17: mod_base = OTHER; note = 2'-O-methoxyethyl modified nucleotide with phosphorothioate linkage
  modified_base 18: mod_base = OTHER; note = 2'-O-methoxyethyl modified thymine with phosphorothioate linkage
  modified_base 19: mod_base = OTHER; note = 2'-O-methoxyethyl modified nucleotide with phosphorothioate linkage
  modified_base 20: mod_base = OTHER; note = 2'-O-methoxyethyl 5-methylcytosine
  misc_feature 1..5: note = RNA
  misc_feature 6..9: note = DNA
  misc_feature 10: note = RNA
  misc_feature 11..15: note = DNA
  misc_feature 16..20: note = RNA
gcagaggtgnagcgaagtgc

SEQ ID NO: 1318 - DNA, 20 bp, synthetic construct
  source 1..20: mol_type = other DNA
  modified_base 1: mod_base = OTHER; note = 2'-O-methoxyethyl modified nucleotide with phosphorothioate linkage
  modified_base 2: mod_base = OTHER; note = 2'-O-methoxyethyl 5-methylcytosine with phosphorothioate linkage
  modified_base 3: mod_base = OTHER; note = 2'-O-methoxyethyl modified nucleotide with phosphorothioate linkage
  modified_base 4: mod_base = OTHER; note = 2'-O-methoxyethyl modified nucleotide with phosphorothioate linkage
  modified_base 5: mod_base = OTHER; note = 2'-O-methoxyethyl modified nucleotide with phosphorothioate linkage
  modified_base 6: mod_base = OTHER; note = Nucleotide with phosphorothioate linkage
  modified_base 7: mod_base = OTHER; note = Nucleotide with phosphorothioate linkage
  modified_base 8: mod_base = OTHER; note = Thymine with phosphorothioate linkage
  modified_base 9: mod_base = OTHER; note = Nucleotide with phosphorothioate linkage
  modified_base 10: mod_base = OTHER; note = 2'-O-methyl modified abasic nucleotide with phosphorothioate linkage
  modified_base 11: mod_base = OTHER; note = Nucleotide with phosphorothioate linkage
  modified_base 12: mod_base = OTHER; note = Nucleotide with phosphorothioate linkage
  modified_base 13: mod_base = OTHER; note = 5-methylcytosine with phosphorothioate linkage
  modified_base 14: mod_base = OTHER; note = Nucleotide with phosphorothioate linkage
  modified_base 15: mod_base = OTHER; note = Nucleotide with phosphorothioate linkage
  modified_base 16: mod_base = OTHER; note = 2'-O-methoxyethyl modified nucleotide with phosphorothioate linkage
  modified_base 17: mod_base = OTHER; note = 2'-O-methoxyethyl modified nucleotide with phosphorothioate linkage
  modified_base 18: mod_base = OTHER; note = 2'-O-methoxyethyl modified thymine with phosphorothioate linkage
  modified_base 19: mod_base = OTHER; note = 2'-O-methoxyethyl modified nucleotide with phosphorothioate linkage
  modified_base 20: mod_base = OTHER; note = Locked 5-methylcytosine
  misc_feature 1..5: note = RNA
  misc_feature 6..9: note = DNA
  misc_feature 10: note = RNA
  misc_feature 11..15: note = DNA
  misc_feature 16..20: note = RNA
gcagaggtgnagcgaagtgc

SEQ ID NO: 1319 - DNA, 20 bp, synthetic construct
  source 1..20: mol_type = other DNA
  modified_base 1: mod_base = OTHER; note = 2'-O-methoxyethyl modified nucleotide with phosphorothioate linkage
  modified_base 2: mod_base = OTHER; note = 2'-O-methoxyethyl 5-methylcytosine with phosphorothioate linkage
  modified_base 3: mod_base = OTHER; note = 2'-O-methoxyethyl modified nucleotide with phosphorothioate linkage
  modified_base 4: mod_base = OTHER; note = 2'-O-methoxyethyl modified nucleotide with phosphorothioate linkage
  modified_base 5: mod_base = OTHER; note = 2'-O-methoxyethyl modified nucleotide with phosphorothioate linkage
  modified_base 6: mod_base = OTHER; note = Nucleotide with phosphorothioate linkage
  modified_base 7: mod_base = OTHER; note = Nucleotide with phosphorothioate linkage
  modified_base 8: mod_base = OTHER; note = Thymine with phosphorothioate linkage
  modified_base 9: mod_base = OTHER; note = Nucleotide with phosphorothioate linkage
  modified_base 10: mod_base = OTHER; note = 2'-O-methyl modified abasic nucleotide with phosphorothioate linkage
  modified_base 11: mod_base = OTHER; note = Nucleotide with phosphorothioate linkage
  modified_base 12: mod_base = OTHER; note = Nucleotide with phosphorothioate linkage
  modified_base 13: mod_base = OTHER; note = 5-methylcytosine with phosphorothioate linkage
  modified_base 14: mod_base = OTHER; note = Nucleotide with phosphorothioate linkage
  modified_base 15: mod_base = OTHER; note = Nucleotide with phosphorothioate linkage
  modified_base 16: mod_base = OTHER; note = 2'-O-methoxyethyl modified nucleotide with phosphorothioate linkage
  modified_base 17: mod_base = OTHER; note = 2'-O-methoxyethyl modified nucleotide with phosphorothioate linkage
  modified_base 18: mod_base = OTHER; note = 2'-O-methoxyethyl modified thymine with phosphorothioate linkage
  modified_base 19: mod_base = OTHER; note = Locked nucleic acid with phosphorothioate linkage
  modified_base 20: mod_base = OTHER; note = 2'-O-methoxyethyl 5-methylcytosine
  misc_feature 1..5: note = RNA
  misc_feature 6..9: note = DNA
  misc_feature 10: note = RNA
  misc_feature 11..15: note = DNA
  misc_feature 16..20: note = RNA
gcagaggtgnagcgaagtgc

SEQ ID NO: 1320 - DNA, 20 bp, synthetic construct
  source 1..20: mol_type = other DNA
  modified_base 1: mod_base = OTHER; note = 2'-O-methoxyethyl modified nucleotide with phosphorothioate linkage
  modified_base 2: mod_base = OTHER; note = 2'-O-methoxyethyl 5-methylcytosine with phosphorothioate linkage
  modified_base 3: mod_base = OTHER; note = 2'-O-methoxyethyl modified nucleotide with phosphorothioate linkage
  modified_base 4: mod_base = OTHER; note = 2'-O-methoxyethyl modified nucleotide with phosphorothioate linkage
  modified_base 5: mod_base = OTHER; note = 2'-O-methoxyethyl modified nucleotide with phosphorothioate linkage
  modified_base 6: mod_base = OTHER; note = Nucleotide with phosphorothioate linkage
  modified_base 7: mod_base = OTHER; note = Nucleotide with phosphorothioate linkage
  modified_base 8: mod_base = OTHER; note = Thymine with phosphorothioate linkage
  modified_base 9: mod_base = OTHER; note = Nucleotide with phosphorothioate linkage
  modified_base 10: mod_base = OTHER; note = 2'-O-methyl modified abasic nucleotide with phosphorothioate linkage
  modified_base 11: mod_base = OTHER; note = Nucleotide with phosphorothioate linkage
  modified_base 12: mod_base = OTHER; note = Nucleotide with phosphorothioate linkage
  modified_base 13: mod_base = OTHER; note = 5-methylcytosine with phosphorothioate linkage
  modified_base 14: mod_base = OTHER; note = Nucleotide with phosphorothioate linkage
  modified_base 15: mod_base = OTHER; note = Nucleotide with phosphorothioate linkage
  modified_base 16: mod_base = OTHER; note = 2'-O-methoxyethyl modified nucleotide with phosphorothioate linkage
  modified_base 17: mod_base = OTHER; note = 2'-O-methoxyethyl modified nucleotide with phosphorothioate linkage
  modified_base 18: mod_base = OTHER; note = Locked thymine with phosphorothioate linkage
  modified_base 19: mod_base = OTHER; note = 2'-O-methoxyethyl modified nucleotide with phosphorothioate linkage
  modified_base 20: mod_base = OTHER; note = 2'-O-methoxyethyl 5-methylcytosine
  misc_feature 1..5: note = RNA
  misc_feature 6..9: note = DNA
  misc_feature 10: note = RNA
  misc_feature 11..15: note = DNA
  misc_feature 16..20: note = RNA
gcagaggtgnagcgaagtgc

SEQ ID NO: 1321 - DNA, 20 bp, synthetic construct
  source 1..20: mol_type = other DNA
  modified_base 1: mod_base = OTHER; note = 2'-O-methoxyethyl modified nucleotide with phosphorothioate linkage
  modified_base 2: mod_base = OTHER; note = 2'-O-methoxyethyl 5-methylcytosine with phosphorothioate linkage
  modified_base 3: mod_base = OTHER; note = 2'-O-methoxyethyl modified nucleotide with phosphorothioate linkage
  modified_base 4: mod_base = OTHER; note = 2'-O-methoxyethyl modified nucleotide with phosphorothioate linkage
  modified_base 5: mod_base = OTHER; note = 2'-O-methoxyethyl modified nucleotide with phosphorothioate linkage
  modified_base 6: mod_base = OTHER; note = Nucleotide with phosphorothioate linkage
  modified_base 7: mod_base = OTHER; note = Nucleotide with phosphorothioate linkage
  modified_base 8: mod_base = OTHER; note = Thymine with phosphorothioate linkage
  modified_base 9: mod_base = OTHER; note = Nucleotide with phosphorothioate linkage
  modified_base 10: mod_base = OTHER; note = 2'-O-methyl modified abasic nucleotide with phosphorothioate linkage
  modified_base 11: mod_base = OTHER; note = Nucleotide with phosphorothioate linkage
  modified_base 12: mod_base = OTHER; note = Nucleotide with phosphorothioate linkage
  modified_base 13: mod_base = OTHER; note = 5-methylcytosine with phosphorothioate linkage
  modified_base 14: mod_base = OTHER; note = Nucleotide with phosphorothioate linkage
  modified_base 15: mod_base = OTHER; note = Nucleotide with phosphorothioate linkage
  modified_base 16: mod_base = OTHER; note = 2'-O-methoxyethyl modified nucleotide with phosphorothioate linkage
  modified_base 17: mod_base = OTHER; note = Locked nucleic acid with phosphorothioate linkage
  modified_base 18: mod_base = OTHER; note = 2'-O-methoxyethyl modified thymine with phosphorothioate linkage
  modified_base 19: mod_base = OTHER; note = 2'-O-methoxyethyl modified nucleotide with phosphorothioate linkage
  modified_base 20: mod_base = OTHER; note = 2'-O-methoxyethyl 5-methylcytosine
  misc_feature 1..5: note = RNA
  misc_feature 6..9: note = DNA
  misc_feature 10: note = RNA
  misc_feature 11..15: note = DNA
  misc_feature 16..20: note = RNA
gcagaggtgnagcgaagtgc

SEQ ID NO: 1322 - DNA, 20 bp, synthetic construct
  source 1..20: mol_type = other DNA
  modified_base 1: mod_base = OTHER; note = 2'-O-methoxyethyl modified nucleotide with phosphorothioate linkage
  modified_base 2: mod_base = OTHER; note = 2'-O-methoxyethyl 5-methylcytosine with phosphorothioate linkage
  modified_base 3: mod_base = OTHER; note = 2'-O-methoxyethyl modified nucleotide with phosphorothioate linkage
  modified_base 4: mod_base = OTHER; note = 2'-O-methoxyethyl modified nucleotide with phosphorothioate linkage
  modified_base 5: mod_base = OTHER; note = 2'-O-methoxyethyl modified nucleotide with phosphorothioate linkage
  modified_base 6: mod_base = OTHER; note = Nucleotide with phosphorothioate linkage
  modified_base 7: mod_base = OTHER; note = Nucleotide with phosphorothioate linkage
  modified_base 8: mod_base = OTHER; note = Thymine with phosphorothioate linkage
  modified_base 9: mod_base = OTHER; note = Nucleotide with phosphorothioate linkage
  modified_base 10: mod_base = OTHER; note = 2'-O-methyl modified abasic nucleotide with phosphorothioate linkage
  modified_base 11: mod_base = OTHER; note = Nucleotide with phosphorothioate linkage
  modified_base 12: mod_base = OTHER; note = Nucleotide with phosphorothioate linkage
  modified_base 13: mod_base = OTHER; note = 5-methylcytosine with phosphorothioate linkage
  modified_base 14: mod_base = OTHER; note = Nucleotide with phosphorothioate linkage
  modified_base 15: mod_base = OTHER; note = Nucleotide with phosphorothioate linkage
  modified_base 16: mod_base = OTHER; note = Locked nucleic acid with phosphorothioate linkage
  modified_base 17: mod_base = OTHER; note = 2'-O-methoxyethyl modified nucleotide with phosphorothioate linkage
  modified_base 18: mod_base = OTHER; note = 2'-O-methoxyethyl modified thymine with phosphorothioate linkage
  modified_base 19: mod_base = OTHER; note = 2'-O-methoxyethyl modified nucleotide with phosphorothioate linkage
  modified_base 20: mod_base = OTHER; note = 2'-O-methoxyethyl 5-methylcytosine
  misc_feature 1..5: note = RNA
  misc_feature 6..9: note = DNA
  misc_feature 10: note = RNA
  misc_feature 11..15: note = DNA
  misc_feature 16..20: note = RNA
gcagaggtgnagcgaagtgc

SEQ ID NO: 1323 - DNA, 20 bp, synthetic construct
  source 1..20: mol_type = other DNA
  modified_base 1: mod_base = OTHER; note = 2'-O-methoxyethyl modified nucleotide with phosphorothioate linkage
  modified_base 2: mod_base = OTHER; note = 2'-O-methoxyethyl 5-methylcytosine with phosphorothioate linkage
  modified_base 3: mod_base = OTHER; note = 2'-O-methoxyethyl modified nucleotide with phosphorothioate linkage
  modified_base 4: mod_base = OTHER; note = 2'-O-methoxyethyl modified nucleotide with phosphorothioate linkage
  modified_base 5: mod_base = OTHER; note = Locked nucleic acid with phosphorothioate linkage
  modified_base 6: mod_base = OTHER; note = Nucleotide with phosphorothioate linkage
  modified_base 7: mod_base = OTHER; note = Nucleotide with phosphorothioate linkage
  modified_base 8: mod_base = OTHER; note = Thymine with phosphorothioate linkage
  modified_base 9: mod_base = OTHER; note = Nucleotide with phosphorothioate linkage
  modified_base 10: mod_base = OTHER; note = 2'-O-methyl modified abasic nucleotide with phosphorothioate linkage
  modified_base 11: mod_base = OTHER; note = Nucleotide with phosphorothioate linkage
  modified_base 12: mod_base = OTHER; note = Nucleotide with phosphorothioate linkage
  modified_base 13: mod_base = OTHER; note = 5-methylcytosine with phosphorothioate linkage
  modified_base 14: mod_base = OTHER; note = Nucleotide with phosphorothioate linkage
  modified_base 15: mod_base = OTHER; note = Nucleotide with phosphorothioate linkage
  modified_base 16: mod_base = OTHER; note = 2'-O-methoxyethyl modified nucleotide with phosphorothioate linkage
  modified_base 17: mod_base = OTHER; note = 2'-O-methoxyethyl modified nucleotide with phosphorothioate linkage
  modified_base 18: mod_base = OTHER; note = 2'-O-methoxyethyl modified thymine with phosphorothioate linkage
  modified_base 19: mod_base = OTHER; note = 2'-O-methoxyethyl modified nucleotide with phosphorothioate linkage
  modified_base 20: mod_base = OTHER; note = 2'-O-methoxyethyl 5-methylcytosine
  misc_feature 1..5: note = RNA
  misc_feature 6..9: note = DNA
  misc_feature 10: note = RNA
  misc_feature 11..15: note = DNA
  misc_feature 16..20: note = RNA
gcagaggtgnagcgaagtgc

SEQ ID NO: 1324 - DNA, 20 bp, synthetic construct
  source 1..20: mol_type = other DNA
  modified_base 1: mod_base = OTHER; note = 2'-O-methoxyethyl modified nucleotide with phosphorothioate linkage
  modified_base 2: mod_base = OTHER; note = 2'-O-methoxyethyl 5-methylcytosine with phosphorothioate linkage
  modified_base 3: mod_base = OTHER; note = 2'-O-methoxyethyl modified nucleotide with phosphorothioate linkage
  modified_base 4: mod_base = OTHER; note = Locked nucleic acid with phosphorothioate linkage
  modified_base 5: mod_base = OTHER; note = Locked nucleic acid with phosphorothioate linkage
  modified_base 6: mod_base = OTHER; note = Nucleotide with phosphorothioate linkage
  modified_base 7: mod_base = OTHER; note = Nucleotide with phosphorothioate linkage
  modified_base 8: mod_base = OTHER; note = Thymine with phosphorothioate linkage
  modified_base 9: mod_base = OTHER; note = Nucleotide with phosphorothioate linkage
  modified_base 10: mod_base = OTHER; note = 2'-O-methyl modified abasic nucleotide with phosphorothioate linkage
  modified_base 11: mod_base = OTHER; note = Nucleotide with phosphorothioate linkage
  modified_base 12: mod_base = OTHER; note = Nucleotide with phosphorothioate linkage
  modified_base 13: mod_base = OTHER; note = 5-methylcytosine with phosphorothioate linkage
  modified_base 14: mod_base = OTHER; note = Nucleotide with phosphorothioate linkage
  modified_base 15: mod_base = OTHER; note = Nucleotide with phosphorothioate linkage
  modified_base 16: mod_base = OTHER; note = 2'-O-methoxyethyl modified nucleotide with phosphorothioate linkage
  modified_base 17: mod_base = OTHER; note = 2'-O-methoxyethyl modified nucleotide with phosphorothioate linkage
  modified_base 18: mod_base = OTHER; note = 2'-O-methoxyethyl modified thymine with phosphorothioate linkage
  modified_base 19: mod_base = OTHER; note = 2'-O-methoxyethyl modified nucleotide with phosphorothioate linkage
  modified_base 20: mod_base = OTHER; note = 2'-O-methoxyethyl 5-methylcytosine
  misc_feature 1..5: note = RNA
  misc_feature 6..9: note = DNA
  misc_feature 10: note = RNA
  misc_feature 11..15: note = DNA
  misc_feature 16..20: note = RNA
gcagaggtgnagcgaagtgc

SEQ ID NO: 1325 - DNA, 20 bp, synthetic construct
  source 1..20: mol_type = other DNA
  modified_base 1: mod_base = OTHER; note = 2'-O-methoxyethyl modified nucleotide with phosphorothioate linkage
  modified_base 2: mod_base = OTHER; note = 2'-O-methoxyethyl 5-methylcytosine with phosphorothioate linkage
  modified_base 3: mod_base = OTHER; note = 2'-O-methoxyethyl modified nucleotide with phosphorothioate linkage
  modified_base 4: mod_base = OTHER; note = Locked nucleic acid with phosphorothioate linkage
  modified_base 5: mod_base = OTHER; note = 2'-O-methoxyethyl modified nucleotide with phosphorothioate linkage
  modified_base 6: mod_base = OTHER; note = Nucleotide with phosphorothioate linkage
  modified_base 7: mod_base = OTHER; note = Nucleotide with phosphorothioate linkage
  modified_base 8: mod_base = OTHER; note = Thymine with phosphorothioate linkage
  modified_base 9: mod_base = OTHER; note = Nucleotide with phosphorothioate linkage
  modified_base 10: mod_base = OTHER; note = 2'-O-methyl modified abasic nucleotide with phosphorothioate linkage
  modified_base 11: mod_base = OTHER; note = Nucleotide with phosphorothioate linkage
  modified_base 12: mod_base = OTHER; note = Nucleotide with phosphorothioate linkage
  modified_base 13: mod_base = OTHER; note = 5-methylcytosine with phosphorothioate linkage
  modified_base 14: mod_base = OTHER; note = Nucleotide with phosphorothioate linkage
  modified_base 15: mod_base = OTHER; note = Nucleotide with phosphorothioate linkage
  modified_base 16: mod_base = OTHER; note = Locked nucleic acid with phosphorothioate linkage
  modified_base 17: mod_base = OTHER; note = 2'-O-methoxyethyl modified nucleotide with phosphorothioate linkage
  modified_base 18: mod_base = OTHER; note = 2'-O-methoxyethyl modified thymine with phosphorothioate linkage
  modified_base 19: mod_base = OTHER; note = 2'-O-methoxyethyl modified nucleotide with phosphorothioate linkage
  modified_base 20: mod_base = OTHER; note = 2'-O-methoxyethyl 5-methylcytosine
  misc_feature 1..5: note = RNA
  misc_feature 6..9: note = DNA
  misc_feature 10: note = RNA
  misc_feature 11..15: note = DNA
  misc_feature 16..20: note = RNA
gcagaggtgnagcgaagtgc

SEQ ID NO: 1326 - DNA, 20 bp, synthetic construct
  source 1..20: mol_type = other DNA
  modified_base 1: mod_base = OTHER; note = 2'-O-methoxyethyl modified nucleotide with phosphorothioate linkage
  modified_base 2: mod_base = OTHER; note = 2'-O-methoxyethyl 5-methylcytosine with phosphorothioate linkage
  modified_base 3: mod_base = OTHER; note = 2'-O-methoxyethyl modified nucleotide with phosphorothioate linkage
  modified_base 4: mod_base = OTHER; note = Locked nucleic acid with phosphorothioate linkage
  modified_base 5: mod_base = OTHER; note = 2'-O-methoxyethyl modified nucleotide with phosphorothioate linkage
  modified_base 6: mod_base = OTHER; note = Nucleotide with phosphorothioate linkage
  modified_base 7: mod_base = OTHER; note = Nucleotide with phosphorothioate linkage
  modified_base 8: mod_base = OTHER; note = Thymine with phosphorothioate linkage
  modified_base 9: mod_base = OTHER; note = Nucleotide with phosphorothioate linkage
  modified_base 10: mod_base = OTHER; note = 2'-O-methyl modified abasic nucleotide with phosphorothioate linkage
  modified_base 11: mod_base = OTHER; note = Nucleotide with phosphorothioate linkage
  modified_base 12: mod_base = OTHER; note = Nucleotide with phosphorothioate linkage
  modified_base 13: mod_base = OTHER; note = 5-methylcytosine with phosphorothioate linkage
  modified_base 14: mod_base = OTHER; note = Nucleotide with phosphorothioate linkage
  modified_base 15: mod_base = OTHER; note = Nucleotide with phosphorothioate linkage
  modified_base 16: mod_base = OTHER; note = 2'-O-methoxyethyl modified nucleotide with phosphorothioate linkage
  modified_base 17: mod_base = OTHER; note = Locked nucleic acid with phosphorothioate linkage
  modified_base 18: mod_base = OTHER; note = 2'-O-methoxyethyl modified thymine with phosphorothioate linkage
  modified_base 19: mod_base = OTHER; note = 2'-O-methoxyethyl modified nucleotide with phosphorothioate linkage
  modified_base 20: mod_base = OTHER; note = 2'-O-methoxyethyl 5-methylcytosine
  misc_feature 1..5: note = RNA
  misc_feature 6..9: note = DNA
  misc_feature 10: note = RNA
  misc_feature 11..15: note = DNA
  misc_feature 16..20: note = RNA
gcagaggtgnagcgaagtgc

SEQ ID NO: 1327 - DNA, 20 bp, synthetic construct
  source 1..20: mol_type = other DNA
  modified_base 1: mod_base = OTHER; note = 2'-O-methoxyethyl modified nucleotide with phosphorothioate linkage
  modified_base 2: mod_base = OTHER; note = 2'-O-methoxyethyl 5-methylcytosine with phosphorothioate linkage
  modified_base 3: mod_base = OTHER; note = 2'-O-methoxyethyl modified nucleotide with phosphorothioate linkage
  modified_base 4: mod_base = OTHER; note = Locked nucleic acid with phosphorothioate linkage
  modified_base 5: mod_base = OTHER; note = 2'-O-methoxyethyl modified nucleotide with phosphorothioate linkage
  modified_base 6: mod_base = OTHER; note = Nucleotide with phosphorothioate linkage
  modified_base 7: mod_base = OTHER; note = Nucleotide with phosphorothioate linkage
  modified_base 8: mod_base = OTHER; note = Thymine with phosphorothioate linkage
  modified_base 9: mod_base = OTHER; note = Nucleotide with phosphorothioate linkage
  modified_base 10: mod_base = OTHER; note = 2'-O-methyl modified abasic nucleotide with phosphorothioate linkage
  modified_base 11: mod_base = OTHER; note = Nucleotide with phosphorothioate linkage
  modified_base 12: mod_base = OTHER; note = Nucleotide with phosphorothioate linkage
  modified_base 13: mod_base = OTHER; note = 5-methylcytosine with phosphorothioate linkage
  modified_base 14: mod_base = OTHER; note = Nucleotide with phosphorothioate linkage
  modified_base 15: mod_base = OTHER; note = Nucleotide with phosphorothioate linkage
  modified_base 16: mod_base = OTHER; note = 2'-O-methoxyethyl modified nucleotide with phosphorothioate linkage
  modified_base 17: mod_base = OTHER; note = 2'-O-methoxyethyl modified nucleotide with phosphorothioate linkage
  modified_base 18: mod_base = OTHER; note = Locked thymine with phosphorothioate linkage
  modified_base 19: mod_base = OTHER; note = 2'-O-methoxyethyl modified nucleotide with phosphorothioate linkage
  modified_base 20: mod_base = OTHER; note = 2'-O-methoxyethyl 5-methylcytosine
  misc_feature 1..5: note = RNA
  misc_feature 6..9: note = DNA
  misc_feature 10: note = RNA
  misc_feature 11..15: note = DNA
  misc_feature 16..20: note = RNA
gcagaggtgnagcgaagtgc

SEQ ID NO: 1328 - DNA, 20 bp, synthetic construct
  source 1..20: mol_type = other DNA
  modified_base 1: mod_base = OTHER; note = 2'-O-methoxyethyl modified nucleotide with phosphorothioate linkage
  modified_base 2: mod_base = OTHER; note = 2'-O-methoxyethyl 5-methylcytosine with phosphorothioate linkage
  modified_base 3: mod_base = OTHER; note = 2'-O-methoxyethyl modified nucleotide with phosphorothioate linkage
  modified_base 4: mod_base = OTHER; note = Locked nucleic acid with phosphorothioate linkage
  modified_base 5: mod_base = OTHER; note = 2'-O-methoxyethyl modified nucleotide with phosphorothioate linkage
  modified_base 6: mod_base = OTHER; note = Nucleotide with phosphorothioate linkage
  modified_base 7: mod_base = OTHER; note = Nucleotide with phosphorothioate linkage
  modified_base 8: mod_base = OTHER; note = Thymine with phosphorothioate linkage
  modified_base 9: mod_base = OTHER; note = Nucleotide with phosphorothioate linkage
  modified_base 10: mod_base = OTHER; note = 2'-O-methyl modified abasic nucleotide with phosphorothioate linkage
  modified_base 11: mod_base = OTHER; note = Nucleotide with phosphorothioate linkage
  modified_base 12: mod_base = OTHER; note = Nucleotide with phosphorothioate linkage
  modified_base 13: mod_base = OTHER; note = 5-methylcytosine with phosphorothioate linkage
  modified_base 14: mod_base = OTHER; note = Nucleotide with phosphorothioate linkage
  modified_base 15: mod_base = OTHER; note = Nucleotide with phosphorothioate linkage
  modified_base 16: mod_base = OTHER; note = 2'-O-methoxyethyl modified nucleotide with phosphorothioate linkage
  modified_base 17: mod_base = OTHER; note = 2'-O-methoxyethyl modified nucleotide with phosphorothioate linkage
  modified_base 18: mod_base = OTHER; note = 2'-O-methoxyethyl modified thymine with phosphorothioate linkage
  modified_base 19: mod_base = OTHER; note = Locked nucleic acid with phosphorothioate linkage
  modified_base 20: mod_base = OTHER; note = 2'-O-methoxyethyl 5-methylcytosine
  misc_feature 1..5: note = RNA
  misc_feature 6..9: note = DNA
  misc_feature 10: note = RNA
  misc_feature 11..15: note = DNA
  misc_feature 16..20: note = RNA
gcagaggtgnagcgaagtgc

SEQ ID NO: 1329 - DNA, 20 bp, synthetic construct
  source 1..20: mol_type = other DNA
  modified_base 1: mod_base = OTHER; note = 2'-O-methoxyethyl modified nucleotide with phosphorothioate linkage
  modified_base 2: mod_base = OTHER; note = 2'-O-methoxyethyl 5-methylcytosine with phosphorothioate linkage
  modified_base 3: mod_base = OTHER; note = 2'-O-methoxyethyl modified nucleotide with phosphorothioate linkage
  modified_base 4: mod_base = OTHER; note = Locked nucleic acid with phosphorothioate linkage
  modified_base 5: mod_base = OTHER; note = 2'-O-methoxyethyl modified nucleotide with phosphorothioate linkage
  modified_base 6: mod_base = OTHER; note = Nucleotide with phosphorothioate linkage
  modified_base 7: mod_base = OTHER; note = Nucleotide with phosphorothioate linkage
  modified_base 8: mod_base = OTHER; note = Thymine with phosphorothioate linkage
  modified_base 9: mod_base = OTHER; note = Nucleotide with phosphorothioate linkage
  modified_base 10: mod_base = OTHER; note = 2'-O-methyl modified abasic nucleotide with phosphorothioate linkage
  modified_base 11: mod_base = OTHER; note = Nucleotide with phosphorothioate linkage
  modified_base 12: mod_base = OTHER; note = Nucleotide with phosphorothioate linkage
  modified_base 13: mod_base = OTHER; note = 5-methylcytosine with phosphorothioate linkage
  modified_base 14: mod_base = OTHER; note = Nucleotide with phosphorothioate linkage
  modified_base 15: mod_base = OTHER; note = Nucleotide with phosphorothioate linkage
  modified_base 16: mod_base = OTHER; note = 2'-O-methoxyethyl modified nucleotide with phosphorothioate linkage
  modified_base 17: mod_base = OTHER; note = 2'-O-methoxyethyl modified nucleotide with phosphorothioate linkage
  modified_base 18: mod_base = OTHER; note = 2'-O-methoxyethyl modified thymine with phosphorothioate linkage
  modified_base 19: mod_base = OTHER; note = 2'-O-methoxyethyl modified nucleotide with phosphorothioate linkage
  modified_base 20: mod_base = OTHER; note = Locked 5-methylcytosine
  misc_feature 1..5: note = RNA
  misc_feature 6..9: note = DNA
  misc_feature 10: note = RNA
  misc_feature 11..15: note = DNA
  misc_feature 16..20: note = RNA
gcagaggtgnagcgaagtgc

SEQ ID NO: 1330 - DNA, 20 bp, synthetic construct
  source 1..20: mol_type = other DNA
  modified_base 1: mod_base = OTHER; note = 2'-O-methoxyethyl modified nucleotide with phosphorothioate linkage
  modified_base 2: mod_base = OTHER; note = 2'-O-methoxyethyl 5-methylcytosine with phosphorothioate linkage
  modified_base 3: mod_base = OTHER; note = 2'-O-methoxyethyl modified nucleotide with phosphorothioate linkage
  modified_base 4: mod_base = OTHER; note = 2'-O-methoxyethyl modified nucleotide with phosphorothioate linkage
  modified_base 5: mod_base = OTHER; note = Locked nucleic acid with phosphorothioate linkage
  modified_base 6: mod_base = OTHER; note = Nucleotide with phosphorothioate linkage
  modified_base 7: mod_base = OTHER; note = Nucleotide with phosphorothioate linkage
  modified_base 8: mod_base = OTHER; note = Thymine with phosphorothioate linkage
  modified_base 9: mod_base = OTHER; note = Nucleotide with phosphorothioate linkage
  modified_base 10: mod_base = OTHER; note = 2'-O-methyl modified abasic nucleotide with phosphorothioate linkage
  modified_base 11: mod_base = OTHER; note = Nucleotide with phosphorothioate linkage
  modified_base 12: mod_base = OTHER; note = Nucleotide with phosphorothioate linkage
  modified_base 13: mod_base = OTHER; note = 5-methylcytosine with phosphorothioate linkage
  modified_base 14: mod_base = OTHER; note = Nucleotide with phosphorothioate linkage
  modified_base 15: mod_base = OTHER; note = Nucleotide with phosphorothioate linkage
  modified_base 16: mod_base = OTHER; note = Locked nucleic acid with phosphorothioate linkage
  modified_base 17: mod_base = OTHER; note = 2'-O-methoxyethyl modified nucleotide with phosphorothioate linkage
  modified_base 18: mod_base = OTHER; note = 2'-O-methoxyethyl modified thymine with phosphorothioate linkage
  modified_base 19: mod_base = OTHER; note = 2'-O-methoxyethyl modified nucleotide with phosphorothioate linkage
  modified_base 20: mod_base = OTHER; note = 2'-O-methoxyethyl 5-methylcytosine
  misc_feature 1..5: note = RNA
  misc_feature 6..9: note = DNA
  misc_feature 10: note = RNA
  misc_feature 11..15: note = DNA
  misc_feature 16..20: note = RNA
gcagaggtgnagcgaagtgc

SEQ ID NO: 1331 - DNA, 20 bp, synthetic construct
  source 1..20: mol_type = other DNA
  modified_base 1: mod_base = OTHER; note = 2'-O-methoxyethyl modified nucleotide with phosphorothioate linkage
  modified_base 2: mod_base = OTHER; note = 2'-O-methoxyethyl 5-methylcytosine with phosphorothioate linkage
  modified_base 3: mod_base = OTHER; note = 2'-O-methoxyethyl modified nucleotide with phosphorothioate linkage
  modified_base 4: mod_base = OTHER; note = 2'-O-methoxyethyl modified nucleotide with phosphorothioate linkage
  modified_base 5: mod_base = OTHER; note = Locked nucleic acid with phosphorothioate linkage
  modified_base 6: mod_base = OTHER; note = Nucleotide with phosphorothioate linkage
  modified_base 7: mod_base = OTHER; note = Nucleotide with phosphorothioate linkage
  modified_base 8: mod_base = OTHER; note = Thymine with phosphorothioate linkage
  modified_base 9: mod_base = OTHER; note = Nucleotide with phosphorothioate linkage
  modified_base 10: mod_base = OTHER; note = 2'-O-methyl modified abasic nucleotide with phosphorothioate linkage
  modified_base 11: mod_base = OTHER; note = Nucleotide with phosphorothioate linkage
  modified_base 12: mod_base = OTHER; note = Nucleotide with phosphorothioate linkage
  modified_base 13: mod_base = OTHER; note = 5-methylcytosine with phosphorothioate linkage
  modified_base 14: mod_base = OTHER; note = Nucleotide with phosphorothioate linkage
  modified_base 15: mod_base = OTHER; note = Nucleotide with phosphorothioate linkage
  modified_base 16: mod_base = OTHER; note = 2'-O-methoxyethyl modified nucleotide with phosphorothioate linkage
  modified_base 17: mod_base = OTHER; note = Locked nucleic acid with phosphorothioate linkage
  modified_base 18: mod_base = OTHER; note = 2'-O-methoxyethyl modified thymine with phosphorothioate linkage
  modified_base 19: mod_base = OTHER; note = 2'-O-methoxyethyl modified nucleotide with phosphorothioate linkage
  modified_base 20: mod_base = OTHER; note = 2'-O-methoxyethyl 5-methylcytosine
  misc_feature 1..5: note = RNA
  misc_feature 6..9: note = DNA
  misc_feature 10: note = RNA
  misc_feature 11..15: note = DNA
  misc_feature 16..20: note = RNA
gcagaggtgnagcgaagtgc

SEQ ID NO: 1332 - DNA, 20 bp, synthetic construct
  source 1..20: mol_type = other DNA
  modified_base 1: mod_base = OTHER; note = 2'-O-methoxyethyl modified nucleotide with phosphorothioate linkage
  modified_base 2: mod_base = OTHER; note = 2'-O-methoxyethyl 5-methylcytosine with phosphorothioate linkage
  modified_base 3: mod_base = OTHER; note = 2'-O-methoxyethyl modified nucleotide with phosphorothioate linkage
  modified_base 4: mod_base = OTHER; note = 2'-O-methoxyethyl modified nucleotide with phosphorothioate linkage
  modified_base 5: mod_base = OTHER; note = Locked nucleic acid with phosphorothioate linkage
  modified_base 6: mod_base = OTHER; note = Nucleotide with phosphorothioate linkage
  modified_base 7: mod_base = OTHER; note = Nucleotide with phosphorothioate linkage
  modified_base 8: mod_base = OTHER; note = Thymine with phosphorothioate linkage
  modified_base 9: mod_base = OTHER; note = Nucleotide with phosphorothioate linkage
  modified_base 10: mod_base = OTHER; note = 2'-O-methyl modified abasic nucleotide with phosphorothioate linkage
  modified_base 11: mod_base = OTHER; note = Nucleotide with phosphorothioate linkage
  modified_base 12: mod_base = OTHER; note = Nucleotide with phosphorothioate linkage
  modified_base 13: mod_base = OTHER; note = 5-methylcytosine with phosphorothioate linkage
  modified_base 14: mod_base = OTHER; note = Nucleotide with phosphorothioate linkage
  modified_base 15: mod_base = OTHER; note = Nucleotide with phosphorothioate linkage
  modified_base 16: mod_base = OTHER; note = 2'-O-methoxyethyl modified nucleotide with phosphorothioate linkage
  modified_base 17: mod_base = OTHER; note = 2'-O-methoxyethyl modified nucleotide with phosphorothioate linkage
  modified_base 18: mod_base = OTHER; note = Locked thymine with phosphorothioate linkage
  modified_base 19: mod_base = OTHER; note = 2'-O-methoxyethyl modified nucleotide with phosphorothioate linkage
  modified_base 20: mod_base = OTHER; note = 2'-O-methoxyethyl 5-methylcytosine
  misc_feature 1..5: note = RNA
  misc_feature 6..9: note = DNA
  misc_feature 10: note = RNA
  misc_feature 11..15: note = DNA
  misc_feature 16..20: note = RNA
gcagaggtgnagcgaagtgc

SEQ ID NO: 1333 - DNA, 20 bp, synthetic construct
  source 1..20: mol_type = other DNA
  modified_base 1: mod_base = OTHER; note = 2'-O-methoxyethyl modified nucleotide with phosphorothioate linkage
  modified_base 2: mod_base = OTHER; note = 2'-O-methoxyethyl 5-methylcytosine with phosphorothioate linkage
  modified_base 3: mod_base = OTHER; note = 2'-O-methoxyethyl modified nucleotide with phosphorothioate linkage
  modified_base 4: mod_base = OTHER; note = 2'-O-methoxyethyl modified nucleotide with phosphorothioate linkage
  modified_base 5: mod_base = OTHER; note = Locked nucleic acid with phosphorothioate linkage
  modified_base 6: mod_base = OTHER; note = Nucleotide with phosphorothioate linkage
  modified_base 7: mod_base = OTHER; note = Nucleotide with phosphorothioate linkage
  modified_base 8: mod_base = OTHER; note = Thymine with phosphorothioate linkage
  modified_base 9: mod_base = OTHER; note = Nucleotide with phosphorothioate linkage
  modified_base 10: mod_base = OTHER; note = 2'-O-methyl modified abasic nucleotide with phosphorothioate linkage
  modified_base 11: mod_base = OTHER; note = Nucleotide with phosphorothioate linkage
  modified_base 12: mod_base = OTHER; note = Nucleotide with phosphorothioate linkage
  modified_base 13: mod_base = OTHER; note = 5-methylcytosine with phosphorothioate linkage
  modified_base 14: mod_base = OTHER; note = Nucleotide with phosphorothioate linkage
  modified_base 15: mod_base = OTHER; note = Nucleotide with phosphorothioate linkage
  modified_base 16: mod_base = OTHER; note = 2'-O-methoxyethyl modified nucleotide with phosphorothioate linkage
  modified_base 17: mod_base = OTHER; note = 2'-O-methoxyethyl modified nucleotide with phosphorothioate linkage
  modified_base 18: mod_base = OTHER; note = 2'-O-methoxyethyl modified thymine with phosphorothioate linkage
  modified_base 19: mod_base = OTHER; note = Locked nucleic acid with phosphorothioate linkage
  modified_base 20: mod_base = OTHER; note = 2'-O-methoxyethyl 5-methylcytosine
  misc_feature 1..5: note = RNA
  misc_feature 6..9: note = DNA
  misc_feature 10: note = RNA
  misc_feature 11..15: note = DNA
  misc_feature 16..20: note = RNA
gcagaggtgnagcgaagtgc

SEQ ID NO: 1334 - DNA, 20 bp, synthetic construct
  source 1..20: mol_type = other DNA
  modified_base 1: mod_base = OTHER; note = 2'-O-methoxyethyl modified nucleotide with phosphorothioate linkage
  modified_base 2: mod_base = OTHER; note = 2'-O-methoxyethyl 5-methylcytosine with phosphorothioate linkage
  modified_base 3: mod_base = OTHER; note = 2'-O-methoxyethyl modified nucleotide with phosphorothioate linkage
  modified_base 4: mod_base = OTHER; note = 2'-O-methoxyethyl modified nucleotide with phosphorothioate linkage
  modified_base 5: mod_base = OTHER; note = Locked nucleic acid with phosphorothioate linkage
  modified_base 6: mod_base = OTHER; note = Nucleotide with phosphorothioate linkage
  modified_base 7: mod_base = OTHER; note = Nucleotide with phosphorothioate linkage
  modified_base 8: mod_base = OTHER; note = Thymine with phosphorothioate linkage
  modified_base 9: mod_base = OTHER; note = Nucleotide with phosphorothioate linkage
  modified_base 10: mod_base = OTHER; note = 2'-O-methyl modified abasic nucleotide with phosphorothioate linkage
  modified_base 11: mod_base = OTHER; note = Nucleotide with phosphorothioate linkage
  modified_base 12: mod_base = OTHER; note = Nucleotide with phosphorothioate linkage
  modified_base 13: mod_base = OTHER; note = 5-methylcytosine with phosphorothioate linkage
  modified_base 14: mod_base = OTHER; note = Nucleotide with phosphorothioate linkage
  modified_base 15: mod_base = OTHER; note = Nucleotide with phosphorothioate linkage
  modified_base 16: mod_base = OTHER; note = 2'-O-methoxyethyl modified nucleotide with phosphorothioate linkage
  modified_base 17: mod_base = OTHER; note = 2'-O-methoxyethyl modified nucleotide with phosphorothioate linkage
  modified_base 18: mod_base = OTHER; note = 2'-O-methoxyethyl modified thymine with phosphorothioate linkage
  modified_base 19: mod_base = OTHER; note = 2'-O-methoxyethyl modified nucleotide with phosphorothioate linkage
  modified_base 20: mod_base = OTHER; note = Locked 5-methylcytosine
  misc_feature 1..5: note = RNA
  misc_feature 6..9: note = DNA
  misc_feature 10: note = RNA
  misc_feature 11..15: note = DNA
  misc_feature 16..20: note = RNA
gcagaggtgnagcgaagtgc

SEQ ID NO: 1335 - DNA, 20 bp, synthetic construct
  source 1..20: mol_type = other DNA
  modified_base 1: mod_base = OTHER; note = 2'-O-methoxyethyl modified nucleotide with phosphorothioate linkage
  modified_base 2: mod_base = OTHER; note = 2'-O-methoxyethyl 5-methylcytosine with phosphorothioate linkage
  modified_base 3: mod_base = OTHER; note = 2'-O-methoxyethyl modified nucleotide with phosphorothioate linkage
  modified_base 4: mod_base = OTHER; note = 2'-O-methoxyethyl modified nucleotide with phosphorothioate linkage
  modified_base 5: mod_base = OTHER; note = 2'-O-methoxyethyl modified nucleotide with phosphorothioate linkage
  modified_base 6: mod_base = OTHER; note = Nucleotide with phosphorothioate linkage
  modified_base 7: mod_base = OTHER; note = Nucleotide with phosphorothioate linkage
  modified_base 8: mod_base = OTHER; note = Thymine with phosphorothioate linkage
  modified_base 9: mod_base = OTHER; note = Nucleotide with phosphorothioate linkage
  modified_base 10: mod_base = OTHER; note = 2'-O-methyl modified abasic nucleotide with phosphorothioate linkage
  modified_base 11: mod_base = OTHER; note = Nucleotide with phosphorothioate linkage
  modified_base 12: mod_base = OTHER; note = Nucleotide with phosphorothioate linkage
  modified_base 13: mod_base = OTHER; note = 5-methylcytosine with phosphorothioate linkage
  modified_base 14: mod_base = OTHER; note = Nucleotide with phosphorothioate linkage
  modified_base 15: mod_base = OTHER; note = Nucleotide with phosphorothioate linkage
  modified_base 16: mod_base = OTHER; note = Locked nucleic acid with phosphorothioate linkage
  modified_base 17: mod_base = OTHER; note = Locked nucleic acid with phosphorothioate linkage
  modified_base 18: mod_base = OTHER; note = 2'-O-methoxyethyl modified thymine with phosphorothioate linkage
  modified_base 19: mod_base = OTHER; note = 2'-O-methoxyethyl modified nucleotide with phosphorothioate linkage
  modified_base 20: mod_base = OTHER; note = 2'-O-methoxyethyl 5-methylcytosine
  misc_feature 1..5: note = RNA
  misc_feature 6..9: note = DNA
  misc_feature 10: note = RNA
  misc_feature 11..15: note = DNA
  misc_feature 16..20: note = RNA
gcagaggtgnagcgaagtgc

SEQ ID NO: 1336 - DNA, 20 bp, synthetic construct
  source 1..20: mol_type = other DNA
  modified_base 1: mod_base = OTHER; note = 2'-O-methoxyethyl modified nucleotide with phosphorothioate linkage
  modified_base 2: mod_base = OTHER; note = 2'-O-methoxyethyl 5-methylcytosine with phosphorothioate linkage
  modified_base 3: mod_base = OTHER; note = 2'-O-methoxyethyl modified nucleotide with phosphorothioate linkage
  modified_base 4: mod_base = OTHER; note = 2'-O-methoxyethyl modified nucleotide with phosphorothioate linkage
  modified_base 5: mod_base = OTHER; note = 2'-O-methoxyethyl modified nucleotide with phosphorothioate linkage
  modified_base 6: mod_base = OTHER; note = Nucleotide with phosphorothioate linkage
  modified_base 7: mod_base = OTHER; note = Nucleotide with phosphorothioate linkage
  modified_base 8: mod_base = OTHER; note = Thymine with phosphorothioate linkage
  modified_base 9: mod_base = OTHER; note = Nucleotide with phosphorothioate linkage
  modified_base 10: mod_base = OTHER; note = 2'-O-methyl modified abasic nucleotide with phosphorothioate linkage
  modified_base 11: mod_base = OTHER; note = Nucleotide with phosphorothioate linkage
  modified_base 12: mod_base = OTHER; note = Nucleotide with phosphorothioate linkage
  modified_base 13: mod_base = OTHER; note = 5-methylcytosine with phosphorothioate linkage
  modified_base 14: mod_base = OTHER; note = Nucleotide with phosphorothioate linkage
  modified_base 15: mod_base = OTHER; note = Nucleotide with phosphorothioate linkage
  modified_base 16: mod_base = OTHER; note = Locked nucleic acid with phosphorothioate linkage
  modified_base 17: mod_base = OTHER; note = 2'-O-methoxyethyl modified nucleotide with phosphorothioate linkage
  modified_base 18: mod_base = OTHER; note = Locked thymine with phosphorothioate linkage
  modified_base 19: mod_base = OTHER; note = 2'-O-methoxyethyl modified nucleotide with phosphorothioate linkage
  modified_base 20: mod_base = OTHER; note = 2'-O-methoxyethyl 5-methylcytosine
  misc_feature 1..5: note = RNA
  misc_feature 6..9: note = DNA
  misc_feature 10: note = RNA
  misc_feature 11..15: note = DNA
  misc_feature 16..20: note = RNA
gcagaggtgnagcgaagtgc

SEQ ID NO: 1337 - DNA, 20 bp, synthetic construct
  source 1..20: mol_type = other DNA
  modified_base 1: mod_base = OTHER; note = 2'-O-methoxyethyl modified nucleotide with phosphorothioate linkage
  modified_base 2: mod_base = OTHER; note = 2'-O-methoxyethyl 5-methylcytosine with phosphorothioate linkage
  modified_base 3: mod_base = OTHER; note = 2'-O-methoxyethyl modified nucleotide with phosphorothioate linkage
  modified_base 4: mod_base = OTHER; note = 2'-O-methoxyethyl modified nucleotide with phosphorothioate linkage
  modified_base 5: mod_base = OTHER; note = 2'-O-methoxyethyl modified nucleotide with phosphorothioate linkage
  modified_base 6: mod_base = OTHER; note = Nucleotide with phosphorothioate linkage
  modified_base 7: mod_base = OTHER; note = Nucleotide with phosphorothioate linkage
  modified_base 8: mod_base = OTHER; note = Thymine with phosphorothioate linkage
  modified_base 9: mod_base = OTHER; note = Nucleotide with phosphorothioate linkage
  modified_base 10: mod_base = OTHER; note = 2'-O-methyl modified abasic nucleotide with phosphorothioate linkage
  modified_base 11: mod_base = OTHER; note = Nucleotide with phosphorothioate linkage
  modified_base 12: mod_base = OTHER; note = Nucleotide with phosphorothioate linkage
  modified_base 13: mod_base = OTHER; note = 5-methylcytosine with phosphorothioate linkage
  modified_base 14: mod_base = OTHER; note = Nucleotide with phosphorothioate linkage
  modified_base 15: mod_base = OTHER; note = Nucleotide with phosphorothioate linkage
  modified_base 16: mod_base = OTHER; note = Locked nucleic acid with phosphorothioate linkage
  modified_base 17: mod_base = OTHER; note = 2'-O-methoxyethyl modified nucleotide with phosphorothioate linkage
  modified_base 18: mod_base = OTHER; note = 2'-O-methoxyethyl modified thymine with phosphorothioate linkage
  modified_base 19: mod_base = OTHER; note = Locked nucleic acid with phosphorothioate linkage
  modified_base 20: mod_base = OTHER; note = 2'-O-methoxyethyl 5-methylcytosine
  misc_feature 1..5: note = RNA
  misc_feature 6..9: note = DNA
  misc_feature 10: note = RNA
  misc_feature 11..15: note = DNA
  misc_feature 16..20: note = RNA
gcagaggtgnagcgaagtgc

SEQ ID NO: 1338 - DNA, 20 bp, synthetic construct
  source 1..20: mol_type = other DNA
  modified_base 1: mod_base = OTHER; note = 2'-O-methoxyethyl modified nucleotide with phosphorothioate linkage
  modified_base 2: mod_base = OTHER; note = 2'-O-methoxyethyl 5-methylcytosine with phosphorothioate linkage
  modified_base 3: mod_base = OTHER; note = 2'-O-methoxyethyl modified nucleotide with phosphorothioate linkage
  modified_base 4: mod_base = OTHER; note = 2'-O-methoxyethyl modified nucleotide with phosphorothioate linkage
  modified_base 5: mod_base = OTHER; note = 2'-O-methoxyethyl modified nucleotide with phosphorothioate linkage
  modified_base 6: mod_base = OTHER; note = Nucleotide with phosphorothioate linkage
  modified_base 7: mod_base = OTHER; note = Nucleotide with phosphorothioate linkage
  modified_base 8: mod_base = OTHER; note = Thymine with phosphorothioate linkage
  modified_base 9: mod_base = OTHER; note = Nucleotide with phosphorothioate linkage
  modified_base 10: mod_base = OTHER; note = 2'-O-methyl modified abasic nucleotide with phosphorothioate linkage
  modified_base 11: mod_base = OTHER; note = Nucleotide with phosphorothioate linkage
  modified_base 12: mod_base = OTHER; note = Nucleotide with phosphorothioate linkage
  modified_base 13: mod_base = OTHER; note = 5-methylcytosine with phosphorothioate linkage
  modified_base 14: mod_base = OTHER; note = Nucleotide with phosphorothioate linkage
  modified_base 15: mod_base = OTHER; note = Nucleotide with phosphorothioate linkage
  modified_base 16: mod_base = OTHER; note = Locked nucleic acid with phosphorothioate linkage
  modified_base 17: mod_base = OTHER; note = 2'-O-methoxyethyl modified nucleotide with phosphorothioate linkage
  modified_base 18: mod_base = OTHER; note = 2'-O-methoxyethyl modified thymine with phosphorothioate linkage
  modified_base 19: mod_base = OTHER; note = 2'-O-methoxyethyl modified nucleotide with phosphorothioate linkage
  modified_base 20: mod_base = OTHER; note = Locked 5-methylcytosine
  misc_feature 1..5: note = RNA
  misc_feature 6..9: note = DNA
  misc_feature 10: note = RNA
  misc_feature 11..15: note = DNA
  misc_feature 16..20: note = RNA
gcagaggtgnagcgaagtgc

SEQ ID NO: 1339 - DNA, 20 bp, synthetic construct
  source 1..20: mol_type = other DNA
  modified_base 1: mod_base = OTHER; note = 2'-O-methoxyethyl modified nucleotide with phosphorothioate linkage
  modified_base 2: mod_base = OTHER; note = 2'-O-methoxyethyl 5-methylcytosine with phosphorothioate linkage
  modified_base 3: mod_base = OTHER; note = 2'-O-methoxyethyl modified nucleotide with phosphorothioate linkage
  modified_base 4: mod_base = OTHER; note = 2'-O-methoxyethyl modified nucleotide with phosphorothioate linkage
  modified_base 5: mod_base = OTHER; note = 2'-O-methoxyethyl modified nucleotide with phosphorothioate linkage
  modified_base 6: mod_base = OTHER; note = Nucleotide with phosphorothioate linkage
  modified_base 7: mod_base = OTHER; note = Nucleotide with phosphorothioate linkage
  modified_base 8: mod_base = OTHER; note = Thymine with phosphorothioate linkage
  modified_base 9: mod_base = OTHER; note = Nucleotide with phosphorothioate linkage
  modified_base 10: mod_base = OTHER; note = 2'-O-methyl modified abasic nucleotide with phosphorothioate linkage
  modified_base 11: mod_base = OTHER; note = Nucleotide with phosphorothioate linkage
  modified_base 12: mod_base = OTHER; note = Nucleotide with phosphorothioate linkage
  modified_base 13: mod_base = OTHER; note = 5-methylcytosine with phosphorothioate linkage
  modified_base 14: mod_base = OTHER; note = Nucleotide with phosphorothioate linkage
  modified_base 15: mod_base = OTHER; note = Nucleotide with phosphorothioate linkage
  modified_base 16: mod_base = OTHER; note = 2'-O-methoxyethyl modified nucleotide with phosphorothioate linkage
  modified_base 17: mod_base = OTHER; note = Locked nucleic acid with phosphorothioate linkage
  modified_base 18: mod_base = OTHER; note = Locked thymine with phosphorothioate linkage
  modified_base 19: mod_base = OTHER; note = 2'-O-methoxyethyl modified nucleotide with phosphorothioate linkage
  modified_base 20: mod_base = OTHER; note = 2'-O-methoxyethyl 5-methylcytosine
  misc_feature 1..5: note = RNA
  misc_feature 6..9: note = DNA
  misc_feature 10: note = RNA
  misc_feature 11..15: note = DNA
  misc_feature 16..20: note = RNA
gcagaggtgnagcgaagtgc

SEQ ID NO: 1340 - DNA, 20 bp, synthetic construct
  source 1..20: mol_type = other DNA
  modified_base 1: mod_base = OTHER; note = 2'-O-methoxyethyl modified nucleotide with phosphorothioate linkage
  modified_base 2: mod_base = OTHER; note = 2'-O-methoxyethyl 5-methylcytosine with phosphorothioate linkage
  modified_base 3: mod_base = OTHER; note = 2'-O-methoxyethyl modified nucleotide with phosphorothioate linkage
  modified_base 4: mod_base = OTHER; note = 2'-O-methoxyethyl modified nucleotide with phosphorothioate linkage
  modified_base 5: mod_base = OTHER; note = 2'-O-methoxyethyl modified nucleotide with phosphorothioate linkage
  modified_base 6: mod_base = OTHER; note = Nucleotide with phosphorothioate linkage
  modified_base 7: mod_base = OTHER; note = Nucleotide with phosphorothioate linkage
  modified_base 8: mod_base = OTHER; note = Thymine with phosphorothioate linkage
  modified_base 9: mod_base = OTHER; note = Nucleotide with phosphorothioate linkage
  modified_base 10: mod_base = OTHER; note = 2'-O-methyl modified abasic nucleotide with phosphorothioate linkage
  modified_base 11: mod_base = OTHER; note = Nucleotide with phosphorothioate linkage
  modified_base 12: mod_base = OTHER; note = Nucleotide with phosphorothioate linkage
  modified_base 13: mod_base = OTHER; note = 5-methylcytosine with phosphorothioate linkage
  modified_base 14: mod_base = OTHER; note = Nucleotide with phosphorothioate linkage
  modified_base 15: mod_base = OTHER; note = Nucleotide with phosphorothioate linkage
  modified_base 16: mod_base = OTHER; note = 2'-O-methoxyethyl modified nucleotide with phosphorothioate linkage
  modified_base 17: mod_base = OTHER; note = Locked nucleic acid with phosphorothioate linkage
  modified_base 18: mod_base = OTHER; note = 2'-O-methoxyethyl modified thymine with phosphorothioate linkage
  modified_base 19: mod_base = OTHER; note = Locked nucleic acid with phosphorothioate linkage
  modified_base 20: mod_base = OTHER; note = 2'-O-methoxyethyl 5-methylcytosine
  misc_feature 1..5: note = RNA
  misc_feature 6..9: note = DNA
  misc_feature 10: note = RNA
  misc_feature 11..15: note = DNA
  misc_feature 16..20: note = RNA
gcagaggtgnagcgaagtgc

SEQ ID NO: 1341 - DNA, 20 bp, synthetic construct
  source 1..20: mol_type = other DNA
  modified_base 1: mod_base = OTHER; note = 2'-O-methoxyethyl modified nucleotide with phosphorothioate linkage
  modified_base 2: mod_base = OTHER; note = 2'-O-methoxyethyl 5-methylcytosine with phosphorothioate linkage
  modified_base 3: mod_base = OTHER; note = 2'-O-methoxyethyl modified nucleotide with phosphorothioate linkage
  modified_base 4: mod_base = OTHER; note = 2'-O-methoxyethyl modified nucleotide with phosphorothioate linkage
  modified_base 5: mod_base = OTHER; note = 2'-O-methoxyethyl modified nucleotide with phosphorothioate linkage
  modified_base 6: mod_base = OTHER; note = Nucleotide with phosphorothioate linkage
  modified_base 7: mod_base = OTHER; note = Nucleotide with phosphorothioate linkage
  modified_base 8: mod_base = OTHER; note = Thymine with phosphorothioate linkage
  modified_base 9: mod_base = OTHER; note = Nucleotide with phosphorothioate linkage
  modified_base 10: mod_base = OTHER; note = 2'-O-methyl modified abasic nucleotide with phosphorothioate linkage
  modified_base 11: mod_base = OTHER; note = Nucleotide with phosphorothioate linkage
  modified_base 12: mod_base = OTHER; note = Nucleotide with phosphorothioate linkage
  modified_base 13: mod_base = OTHER; note = 5-methylcytosine with phosphorothioate linkage
  modified_base 14: mod_base = OTHER; note = Nucleotide with phosphorothioate linkage
  modified_base 15: mod_base = OTHER; note = Nucleotide with phosphorothioate linkage
  modified_base 16: mod_base = OTHER; note = 2'-O-methoxyethyl modified nucleotide with phosphorothioate linkage
  modified_base 17: mod_base = OTHER; note = Locked nucleic acid with phosphorothioate linkage
  modified_base 18: mod_base = OTHER; note = 2'-O-methoxyethyl modified thymine with phosphorothioate linkage
  modified_base 19: mod_base = OTHER; note = 2'-O-methoxyethyl modified nucleotide with phosphorothioate linkage
  modified_base 20: mod_base = OTHER; note = Locked 5-methylcytosine
  misc_feature 1..5: note = RNA
  misc_feature 6..9: note = DNA
  misc_feature 10: note = RNA
  misc_feature 11..15: note = DNA
  misc_feature 16..20: note = RNA
gcagaggtgnagcgaagtgc

SEQ ID NO: 1342 - DNA, 20 bp, synthetic construct
  source 1..20: mol_type = other DNA
  modified_base 1: mod_base = OTHER; note = 2'-O-methoxyethyl modified nucleotide with phosphorothioate linkage
  modified_base 2: mod_base = OTHER; note = 2'-O-methoxyethyl 5-methylcytosine with phosphorothioate linkage
  modified_base 3: mod_base = OTHER; note = 2'-O-methoxyethyl modified nucleotide with phosphorothioate linkage
  modified_base 4: mod_base = OTHER; note = 2'-O-methoxyethyl modified nucleotide with phosphorothioate linkage
  modified_base 5: mod_base = OTHER; note = 2'-O-methoxyethyl modified nucleotide with phosphorothioate linkage
  modified_base 6: mod_base = OTHER; note = Nucleotide with phosphorothioate linkage
  modified_base 7: mod_base = OTHER; note = Nucleotide with phosphorothioate linkage
  modified_base 8: mod_base = OTHER; note = Thymine with phosphorothioate linkage
  modified_base 9: mod_base = OTHER; note = Nucleotide with phosphorothioate linkage
  modified_base 10: mod_base = OTHER; note = 2'-O-methyl modified abasic nucleotide with phosphorothioate linkage
  modified_base 11: mod_base = OTHER; note = Nucleotide with phosphorothioate linkage
  modified_base 12: mod_base = OTHER; note = Nucleotide with phosphorothioate linkage
  modified_base 13: mod_base = OTHER; note = 5-methylcytosine with phosphorothioate linkage
  modified_base 14: mod_base = OTHER; note = Nucleotide with phosphorothioate linkage
  modified_base 15: mod_base = OTHER; note = Nucleotide with phosphorothioate linkage
  modified_base 16: mod_base = OTHER; note = 2'-O-methoxyethyl modified nucleotide with phosphorothioate linkage
  modified_base 17: mod_base = OTHER; note = 2'-O-methoxyethyl modified nucleotide with phosphorothioate linkage
  modified_base 18: mod_base = OTHER; note = Locked thymine with phosphorothioate linkage
  modified_base 19: mod_base = OTHER; note = Locked nucleic acid with phosphorothioate linkage
  modified_base 20: mod_base = OTHER; note = 2'-O-methoxyethyl 5-methylcytosine
  misc_feature 1..5: note = RNA
  misc_feature 6..9: note = DNA
  misc_feature 10: note = RNA
  misc_feature 11..15: note = DNA
  misc_feature 16..20: note = RNA
gcagaggtgnagcgaagtgc

SEQ ID NO: 1343 - DNA, 20 bp, synthetic construct
  source 1..20: mol_type = other DNA
  modified_base 1: mod_base = OTHER; note = 2'-O-methoxyethyl modified nucleotide with phosphorothioate linkage
  modified_base 2: mod_base = OTHER; note = 2'-O-methoxyethyl 5-methylcytosine with phosphorothioate linkage
  modified_base 3: mod_base = OTHER; note = 2'-O-methoxyethyl modified nucleotide with phosphorothioate linkage
  modified_base 4: mod_base = OTHER; note = 2'-O-methoxyethyl modified nucleotide with phosphorothioate linkage
  modified_base 5: mod_base = OTHER; note = 2'-O-methoxyethyl modified nucleotide with phosphorothioate linkage
  modified_base 6: mod_base = OTHER; note = Nucleotide with phosphorothioate linkage
  modified_base 7: mod_base = OTHER; note = Nucleotide with phosphorothioate linkage
  modified_base 8: mod_base = OTHER; note = Thymine with phosphorothioate linkage
  modified_base 9: mod_base = OTHER; note = Nucleotide with phosphorothioate linkage
  modified_base 10: mod_base = OTHER; note = 2'-O-methyl modified abasic nucleotide with phosphorothioate linkage
  modified_base 11: mod_base = OTHER; note = Nucleotide with phosphorothioate linkage
  modified_base 12: mod_base = OTHER; note = Nucleotide with phosphorothioate linkage
  modified_base 13: mod_base = OTHER; note = 5-methylcytosine with phosphorothioate linkage
  modified_base 14: mod_base = OTHER; note = Nucleotide with phosphorothioate linkage
  modified_base 15: mod_base = OTHER; note = Nucleotide with phosphorothioate linkage
  modified_base 16: mod_base = OTHER; note = 2'-O-methoxyethyl modified nucleotide with phosphorothioate linkage
  modified_base 17: mod_base = OTHER; note = 2'-O-methoxyethyl modified nucleotide with phosphorothioate linkage
  modified_base 18: mod_base = OTHER; note = Locked thymine with phosphorothioate linkage
  modified_base 19: mod_base = OTHER; note = 2'-O-methoxyethyl modified nucleotide with phosphorothioate linkage
  modified_base 20: mod_base = OTHER; note = Locked 5-methylcytosine
  misc_feature 1..5: note = RNA
  misc_feature 6..9: note = DNA
  misc_feature 10: note = RNA
  misc_feature 11..15: note = DNA
  misc_feature 16..20: note = RNA
gcagaggtgnagcgaagtgc

SEQ ID NO: 1344 - DNA, 20 bp, synthetic construct
  source 1..20: mol_type = other DNA
  modified_base 1: mod_base = OTHER; note = 2'-O-methoxyethyl modified nucleotide with phosphorothioate linkage
  modified_base 2: mod_base = OTHER; note = 2'-O-methoxyethyl 5-methylcytosine with phosphorothioate linkage
  modified_base 3: mod_base = OTHER; note = 2'-O-methoxyethyl modified nucleotide with phosphorothioate linkage
  modified_base 4: mod_base = OTHER; note = 2'-O-methoxyethyl modified nucleotide with phosphorothioate linkage
  modified_base 5: mod_base = OTHER; note = 2'-O-methoxyethyl modified nucleotide with phosphorothioate linkage
  modified_base 6: mod_base = OTHER; note = Nucleotide with phosphorothioate linkage
  modified_base 7: mod_base = OTHER; note = Nucleotide with phosphorothioate linkage
  modified_base 8: mod_base = OTHER; note = Thymine with phosphorothioate linkage
  modified_base 9: mod_base = OTHER; note = Nucleotide with phosphorothioate linkage
  modified_base 10: mod_base = OTHER; note = 2'-O-methyl modified abasic nucleotide with phosphorothioate linkage
  modified_base 11: mod_base = OTHER; note = Nucleotide with phosphorothioate linkage
  modified_base 12: mod_base = OTHER; note = Nucleotide with phosphorothioate linkage
  modified_base 13: mod_base = OTHER; note = 5-methylcytosine with phosphorothioate linkage
  modified_base 14: mod_base = OTHER; note = Nucleotide with phosphorothioate linkage
  modified_base 15: mod_base = OTHER; note = Nucleotide with phosphorothioate linkage
  modified_base 16: mod_base = OTHER; note = 2'-O-methoxyethyl modified nucleotide with phosphorothioate linkage
  modified_base 17: mod_base = OTHER; note = 2'-O-methoxyethyl modified nucleotide with phosphorothioate linkage
  modified_base 18: mod_base = OTHER; note = 2'-O-methoxyethyl modified thymine with phosphorothioate linkage
  modified_base 19: mod_base = OTHER; note = Locked nucleic acid with phosphorothioate linkage
  modified_base 20: mod_base = OTHER; note = Locked 5-methylcytosine
  misc_feature 1..5: note = RNA
  misc_feature 6..9: note = DNA
  misc_feature 10: note = RNA
  misc_feature 11..15: note = DNA
  misc_feature 16..20: note = RNA
gcagaggtgnagcgaagtgc

1. An antisense oligonucleotide (ASO) that is complementary to at least 5 contiguous nucleotides within positions 1570-1610 of SEQ ID NO: 1, has a nucleic acid sequence comprising or consisting of 18-23 nucleotides and, optionally, at least one of the nucleotides is replaced with an abasic monomer, and comprises at least one phosphorothioate linkage and at least one 2′-O-methoxyethyl (2′-MOE) nucleotide.

2-3. (canceled)

4. The ASO of claim 1, wherein the nucleic acid sequence comprises any one of SEQ ID NOs: 321-352.

5-7. (canceled)

8. The ASO of claim 1, wherein the ASO comprises:
(a) a 5′-wing region (A′) comprising 2 to 7 locked nucleotides or substituted nucleotides;
(b) a central region (B′) comprising 5 or more contiguous nucleotides, wherein the central region comprises DNA nucleotides; and
(c) a 3′-wing region (C′) comprising 2 to 7 locked nucleotides or substituted nucleotides.

9-14. (canceled)

15. The ASO of claim 8, wherein the central region (B′) comprises at least one RNA: at least one 2′-substituted nucleotide selected from 2′-O-cyp, 2′-O-mcyp, 2′-OMe, 2′-OMe-3′-xylo; at least one nucleotide with a modified base selected from (8nh)G, (8nh)A, (2s)T, and (5oh)C; at least one abasic monomer; or any combination thereof.

16. The ASO of claim 15, wherein the ASO comprises an abasic monomer selected from abasic monomer 1, abasic monomer 2, abasic monomer 3, and abasic monomer 4 located at position 1, 2, 3, 4, 5, 6, 7, 8, 9, or 10 of the central region (B′) relative to the 5′ end of the ASO.

17-22. (canceled)

23. An antisense oligonucleotide (ASO) comprising any one of SEQ ID NOs: 3-320, 353-404, and 446-1344.

24. (canceled)

25. A pharmaceutical composition comprising the ASO according to claim 1 and a pharmaceutically acceptable excipient.

26. A method of treating a subject having a Hepatitis B virus (HBV) infection, comprising administering to the subject with HBV an ASO according to claim 1.

27-35. (canceled)

36. An antisense oligonucleotide (ASO), comprising:
(a) a 5′-wing region (A′) comprising 2 to 7 nucleotides;
(b) a central region (B′) comprising up to 16 positions comprising at least one abasic monomer and 5 to 15 nucleotides; and
(c) a 3′-wing region (C′) comprising 2 to 7 nucleotides.

37. The ASO according to claim 36, wherein the 2 to 7 nucleotides of the 5′-wing region (A′) are locked nucleotides or substituted nucleotides, and wherein the 2 to 7 nucleotides of the 3′-wing region (C′) are locked nucleotides or substituted nucleotides.

38. (canceled)

39. The ASO according to claim 36, wherein the at least one abasic monomer has a structure of [chemical structure]
wherein R is H, an alkyl, an alkoxy, O-cyp, or O-mcyp or R can connect to the 4′ of the sugar to form a locked abasic monomer, and wherein [symbol] represents a phosphodiester linkage, a phosphorothioate linkage, or a mesyl phosphoroamidate linkage.

40. The ASO according to claim 36, wherein the at least one abasic monomer is selected from abasic monomer 1, abasic monomer 2, abasic monomer 3, and abasic monomer 4.

41. The ASO according to claim 36, wherein the central region (B′) comprises 10 positions and the at least one abasic monomer is located at any one of positions 4, 5, or 6 of the central region (B′).

42. The ASO according to claim 36, wherein the 5′-wing region (A′) and the 3′-wing region (C′) each independently comprise 5 nucleotides, and wherein the 5 nucleotides comprise locked nucleotides, 2′-MOE nucleotides, or a combination thereof.

43. (canceled)

44. The ASO according to claim 36, wherein
(i) the 5 to 15 nucleotides of the central region (B′) are DNA;
(ii) at least one and up to all linkages in the ASO are phosphorothioate linkages;
(iii) the central region (B′) contains only one abasic monomer; or
(iv) any combination of (i)-(iii).

45-47. (canceled)

48. The ASO according to claim 36, wherein:
the 5′-wing region (A′) and the 3′-wing region (C′) each independently comprise five 2′-MOE nucleotides, the central region (B′) comprises 10 positions and the at least one abasic monomer is located at any one of positions 4, 5, or 6 of the central region (B′), wherein all linkages in the ASO are phosphorothioate linkages; and, optionally, wherein:
(i) the 5′-wing region (A′) comprises one or two locked nucleic acids (LNAs);
(ii) the 3′-wing region (C′) comprises one or two LNAs; or
(iii) the 5′-wing region (A′) comprises one LNA and the 3′-wing region (C′) comprises one LNA.

49. The ASO according to claim 36, wherein:
(a) the 5′-wing region (A′) and the 3′-wing region (C′) each independently comprise five 2′-MOE nucleotides, the central region (B′) comprises 10 positions consisting of one abasic monomer 1 at position 4 and the remaining positions being DNA nucleotides, wherein all linkages in the ASO are phosphorothioate linkages;
(b) the 5′-wing region (A′) and the 3′-wing region (C′) each independently comprise five 2′-MOE nucleotides, the central region (B′) comprises 10 positions consisting of one abasic monomer 1 at position 5 and the remaining positions being DNA nucleotides, wherein all linkages in the ASO are phosphorothioate linkages;
(c) the 5′-wing region (A′) and the 3′-wing region (C′) each independently comprise five 2′-MOE nucleotides, the central region (B′) comprises 10 positions consisting of one abasic monomer 1 at position 6 and the remaining positions being DNA nucleotides, wherein all linkages in the ASO are phosphorothioate linkages;
(d) the 5′-wing region (A′) and the 3′-wing region (C′) each independently comprise five 2′-MOE nucleotides, the central region (B′) comprises 10 positions consisting of one abasic monomer 2 at position 4 and the remaining positions being DNA nucleotides, wherein all linkages in the ASO are phosphorothioate linkages;
(e) the 5′-wing region (A′) and the 3′-wing region (C′) each independently comprise five 2′-MOE nucleotides, the central region (B′) comprises 10 positions consisting of one abasic monomer 2 at position 5 and the remaining positions being DNA nucleotides, wherein all linkages in the ASO are phosphorothioate linkages;
(f) the 5′-wing region (A′) and the 3′-wing region (C′) each independently comprise five 2′-MOE nucleotides, the central region (B′) comprises 10 positions consisting of one abasic monomer 2 at position 6 and the remaining positions being DNA nucleotides, wherein all linkages in the ASO are phosphorothioate linkages;
(g) the 5′-wing region (A′) comprises five 2′-MOE nucleotides; the 3′-wing region (C′) comprises five positions comprising 2′-MOE nucleotides at positions 1, 2, and 4 and LNAs at positions 3 and 5; and the central region (B′) comprises 10 positions consisting of one abasic monomer 1 at position 6 and the remaining positions being DNA nucleotides, wherein all linkages in the ASO are phosphorothioate linkages; or
(h) the 5′-wing region (A′) comprises five positions comprising 2′-MOE nucleotides at positions 1, 2, 4, and 5 and an LNAs at position 3; the 3′-wing region (C′) comprises five positions comprising 2′-MOE nucleotides at positions 1, 2, 4, and 5 and an LNA at position 3; the central region (B′) comprises 10 positions consisting of one abasic monomer 2 at position 6 and the remaining positions being DNA nucleotides, wherein all linkages in the ASO are phosphorothioate linkages.

50. The ASO according to claim 36, wherein the ASO is selected from ASO-676 (SEQ ID NO: 697), ASO-677 (SEQ ID NO: 698), ASO-1037 (SEQ ID NO: 1058), ASO-707 (SEQ ID NO: 728), ASO-1192 (SEQ ID NO: 1213), ASO-962 (SEQ ID NO: 983), ASO-678 (SEQ ID NO: 699), ASO-1191 (SEQ ID NO: 1212), ASO-1193 (SEQ ID NO: 1213), ASO-1036 (SEQ ID NO: 1057), ASO-651 (SEQ ID NO: 672), ASO-1166 (SEQ ID NO: 1187), ASO-1181 (SEQ ID NO: 1202), and ASO-1179 (SEQ ID NO: 1200).

51. The ASO according to claim 36, wherein the ASO further comprises a conjugate attached to the 5′ end or 3′ end of the ASO, wherein the conjugate comprises a GalNAc.

52. (canceled)

53. The ASO according to claim 51, wherein the GalNAc is a monomeric GalNAc.

54. The ASO according to claim 51, wherein the GalNAc is GalNAc 4.

55. (canceled)
